(19) United States
(12) Patent Application Publication
(10) Pub. No.: US 2025/0290128 A1
(43) Pub. Date: Sep. 18, 2025

(54) METHOD OF MEASURING MICROSATELLITE LENGTH VARIATIONS

(71) Applicant: Cold Spring Harbor Laboratory, Cold Spring Harbor, NY (US)

(72) Inventors: Michael Wigler, Cold Spring Harbor, NY (US); Dan Levy, Cold Spring Harbor, NY (US); Siran Li, Cold Spring Harbor, NY (US); Zihua Wang, Cold Spring Harbor, NY (US); Andrea Moffitt, Cold Spring Harbor, NY (US); Peter Andrews, Cold Spring Harbor, NY (US)

(73) Assignee: Cold Spring Harbor Laboratory, Cold Spring Harbor, NY (US)

(21) Appl. No.: 18/690,018

(22) PCT Filed: Sep. 9, 2022
(86) PCT No.: PCT/US2022/076178

§ 371 Date: Mar. 7, 2024

Related U.S. Application Data
(60) Provisional application No. 63/243,033, filed on Sep. 10, 2021.
(60) Provisional application No. 63/263,479, filed on Nov. 3, 2021.
(60) Provisional application No. 63/263,716, filed on Nov. 8, 2021.

(51) Int. Cl. C12Q 1/6869; C12N 15/10; C12Q 1/37; C12Q 1/6806; C12Q 1/686

(52) U.S. Cl. CPC C12Q 1/6869; C12N 15/1058; C12Q 1/37; C12Q 1/6806; C12Q 1/686; C12Q 2600/156

(57) ABSTRACT

This invention provides a method for obtaining microsatellite lengths from initial nucleic acid templates each of which comprise a microsatellite and two flanking portions, which define the microsatellite and its locus.

### CROSS-REFERENCE TO RELATED APPLICATIONS

[0001] This application is a § 371 national stage of PCT International Application No. PCT/US2022/076178, filed Sep. 9, 2022, claiming the benefit of U.S. Provisional Application No. 63/263,716, filed Nov. 8, 2021, U.S. Provisional Application No. 63/263,479 filed Nov. 3, 2021, and U.S. Provisional Application No. 63/243,033 filed Sep. 10, 2021, the contents of each of which are hereby incorporated by reference into the subject application.

[0002] Throughout this application, various publications are referenced, including referenced in parenthesis. The disclosures of all publications mentioned in this application in their entireties are hereby incorporated by reference into this application in order to provide additional description of the art to which this invention pertains and of the features in the art which can be employed with this invention.

### REFERENCE TO SEQUENCE LISTING

[0003] This application incorporates-by-reference nucleotide sequences which are present in the file named “241028_91762-A-PCT-US_Sequence_Listing_DH.xml”, which is 3,433,049 bytes in size, and which was created on Oct. 25, 2024 in the IBM-PC machine format, having an operating system compatibility with MS-Windows, which is contained in the xml file filed Oct. 28, 2024 as part of this application.

### BACKGROUND OF THE INVENTION

[0004] Replication of tandem repeats of simple sequence motifs, also known as microsatellites, is error prone and variable lengths frequently occur during population expansions. Therefore, microsatellite length variations could serve as markers for cancer. However, accurate error-free quantitation of microsatellite lengths is difficult with current methods because of a high error rate during amplification and sequencing.

[0005] Tumors have genomic variants that distinguish them from the germline genome. These include single nucleotide variants (SNVs), small indels, large scale copy number variation (CNVs), and microsatellite length variation (MSLV). The profile of tumor variation has value in outcome prediction, the measurement of minimal residual disease, and possibly the early detection of cancer.

[0006] Accurate measurement of MSLV remains a challenge in the art. This class of variation is very abundant in cancers from patients with defects in mismatch repair (Eshleman, J. R. & Markowitz, S. D., 1996; Lynch, H. T. et al., 2009), but also in cancers in general (Bonneville, R. et al. 2017; Fujimoto, A. et al., 2020; Hause, R. J., et al., 2016; Kim, T. M., et al., 2013). If MS lengths could be typed accurately it would open a potentially efficient way to fingerprint a cancer and to measure its presence in clinical specimens such as tissue biopsies, blood and urine (Georgiadis, A. et al., 2019; Silveira, A. B. et al., 2020). The problem is that the same property of microsatellites that make their length unstable in cancer (and causes extensive heterogeneity in germline populations), namely, the repeat of a simple sequence motif, makes them unstable during amplification and sequencing. The microsatellite can expand or contract by units of the repeat, presumably due to polymerase slippage during replication (Clarke, L. A., et al., 2001, Kunkel, T. A., 1986; Lai, Y., et al., 2003; Shinde, D., et al. 2003). This is particularly problematic when measuring the lengths of mononucleotide repeats, which are the most highly variable type of repeat in cancers (Bonneville, R. et al. 2017; Fujimoto, A. et al., 2020; Hause, R. J., et al., 2016; Kim, T. M., et al., 2013). In addition, modern day high throughput sequence platforms fail to read mono-nucleotide tracts accurately (Stoler, N. & Nekrutenko, A., 2021; Zavodna, M., et al., 2014).

[0007] To tackle this problem, various approaches have been applied to date. Multiplex PCR and capillary electrophoresis has been described with 5-10 microsatellite loci (Bacher, J. W. et al., 2004; Boland, C. R. et al., 1998; Murphy, K. M. et al., 2006). MS lengths have been characterized from gene panels and high throughput sequencing (Georgiadis, A. et al., 2019; Middha, S. et al., 2017), and statistical methods have been developed to increase accuracy in calling MS lengths (Fungtammasan, A. et al., 2015; Highnam, G. et al., 2013). Finally, droplet digital PCR has also been employed (Silveira, A. B. et al., 2020) to increase accuracy for small numbers of loci. None of these methods has the scale, depth, generality and accuracy all of which would be required for routinely monitoring a large panel of microsatellite loci.

### SUMMARY OF THE INVENTION

[0008] This invention provides a method for measuring microsatellite lengths of initial nucleic acid templates each of which comprise a microsatellite and two flanking portions, which flanking portions delineate the microsatellite, the method comprising:
[0009] (a) generating partially mutagenized templates by:
   [0010] (i) partial mutagenesis of the initial nucleic acid templates;
   [0011] (ii) partial mutagenesis during production of first copies of the initial nucleic acid templates; and/or
   [0012] (iii) generating first copies of the initial nucleic acid templates followed by partial mutagenesis of the first copies of the initial nucleic acid templates;
[0013] (b) making a sequencing library from the partially mutagenized templates;
[0014] (c) sequencing the library from step (b) to generate sequence reads;
[0015] (d) selecting a set of sequence reads in which the microsatellite has been disrupted by mutagenesis so that
   [0016] (i) at least two, preferably more of the tandem repeat units in the microsatellite have been mutagenized; and
   [0017] (ii) the microsatellite in the sequence read has no more than 7, preferably 5 or fewer, tandem repeats in a row; and
[0018] (e) measuring microsatellite lengths from the set of sequence reads selected in step
[0019] (d), wherein the measurement is the distance between the flanking portions that delineate the microsatellite of the initial templates.

[0020] This invention also provides a method for measuring microsatellite lengths of initial nucleic acid templates each of which comprise a microsatellite and two flanking portions, which flanking portions delineate the microsatellite, the method comprising:
[0021] (a) generating partially mutagenized templates by:
   [0022] (i) partial mutagenesis of the initial nucleic acid templates;
   [0023] (ii) partial mutagenesis during production of first copies of the initial nucleic acid templates; and/or
   [0024] (iii) generating first copies of the initial nucleic acid templates followed by partial mutagenesis of the first copies of the initial nucleic acid templates; making a sequencing library from the partially mutagenized templates;
[0025] (c) sequencing the library from step (b) to generate sequence reads;
[0026] (d) selecting a set of sequence reads in which the microsatellite exceeds a disruption index so that the error rate between matched pairs is less than 2%, less than 1%, or preferably less than 0.5%, wherein matched pairs are independent reads that share a template, first copy, or locus; and
[0027] (e) measuring microsatellite lengths from the set of sequence reads selected in step (d), wherein the measurement is the distance between the flanking portions that delineate the microsatellite of the initial templates.

[0028] This invention also provides a sequencing library comprising nucleic acid templates, wherein at least 5%, preferably at least 10%, more preferably at least 20%, and more preferably at least 30% of the nucleic acid templates comprise:
[0029] (a) a mutagenized microsatellite in which:
   [0030] (i) at least two, preferably more of the tandem repeat units in the microsatellite have been mutagenized; and
   [0031] (ii) the mutagenized microsatellite has no more than 7, preferably 5 or fewer, tandem repeats in a row; and
[0032] (b) two flanking portions.

[0033] This invention also provides a sequencing library comprising nucleic acid templates which comprise:
[0034] (a) a mutagenized microsatellite in which:
   [0035] (i) at least two, preferably more of the tandem repeat units in the microsatellite have been mutagenized; and
   [0036] (ii) the mutagenized microsatellite has no more than 7, preferably 5 or fewer, tandem repeats in a row; and
[0037] (b) flanking portions which are not mutagenized.

### BRIEF DESCRIPTION OF THE DRAWINGS

[0038] FIG. 1: Template sequence with microsatellite. Top: An example of a template sequence is shown, with a C microsatellite (MS) of length 17, from position 25 to 41 in the sequence, of length 17. The left flank sequence (LF) ends with A at position 24, the left boundary. The right flank sequence (RF) starts with A at position 42, the right boundary. The MS length is delineated by the left and right boundaries, and is of length 43−24+1=17. Middle: For reads that derive from the above template after partial mutagenesis, specifically bisulfite treatment, some portion of the C's in the read will be read as T's, both within the microsatellite and within the flanks. C's that are read as T's are indicated in bold. Bottom: To process the mutated read computationally, all C's are converted to T's. These bases are shown in bold.

[0039] FIG. 2: Searching for flank sequences. Top: To search for flank sequences in the fully converted reads, the search string for the flank sequences are computationally converted as well, shown by C to T bases in bold. Bottom: Fully converted flank sequences are aligned with a fully converted read sequence to define the left and right boundaries of the microsatellite. Single nucleotide polymorphisms (SNPs) or single base sequencing errors (bold italic base) in the read can be tolerated in the flank-read match.

[0040] FIG. 3: Bench protocol for partial mutagenesis. In step 1, each of the two synthetic templates containing C were partially bisulfite converted. In steps 2-3, about 6*10\hat{ }4 of these templates underwent 9 cycles of linear amplification by using a biotinylated oligo. In step 4, double-stranded DNA fragments were obtained in another round of linear amplification by using UP1. In step 5, extra free oligo was removed by exonuclease I. After adding carrier DNA, biotinylated DNA fragments were purified by streptavidin beads. In step 6, the exponential PCR was carried out using UP1 and UP3 to generate enough material to prepare the DNA libraries for sequencing. These were sequenced as 2×150 bp paired-end runs on MiSeq (steps 7-8).

[0041] FIG. 4: Reads per first copies. For each of the 5 libraries, the reads per first copy distributions used to establish a cutoff for minimum reads for a first copy to be well-covered are shown. Each first copy has a point on the graph, with the x-axis indicating its position in a sorted list by number of reads, and the y-axis indicating the number of reads assigned to that first copy.

[0042] FIG. 5: Luria-Delbruck Diffusion Code. Python code for simulating Luria-Delbruck Diffusion is shown.

[0043] FIG. 6A to FIG. 6F: Sequencing base quality and base composition. For each of the 5 libraries, the raw sequencing reads are split into 4 sets, based on read number 1 or 2, and base composition of the microsatellite (A vs. T, C vs. G, CA vs. TG). For each set of reads, the per base Phred-scale quality score is shown, as well as the per base composition of A/C/G/T. In the base quality plot, the black dashed line indicates mean base quality; the box plot shows the 25^{th} and 75^{th} quantiles in grey shading and the 10^{th} and 90^{th} quantiles in black error bars; the grey horizontal line appearing within the grey shaded box plot shows median base quality. The microsatellite region is highlighted with shading in both plots. Base quality drops dramatically after reading through the mononucleotide microsatellites. This impact on base quality is not observed in the mutated libraries.

[0044] FIG. 7: Drop-out and matching tract lengths. For each of the unmutated mononucleotide tracts, M-17 (A−) and M-18 (C−), a scatterplot of the measured lengths from the two reads in the pair is shown, with the length measured from the read reading the mono tract as A or C track on the x-axis and the length measured from the read reading the mono tract as a T or G track on the y-axis. The −1 position is reserved for those cases where both strands were unable to make a microsatellite call. This plot contains a down-sampling to 1 million data points.

[0045] FIG. 8: MSL distributions for reads and first copies. For each of the five libraries, distribution of observed MSLV is plotted. The upper panels show the distribution of read counts and the lower panels show the distribution of first copy modal lengths. The expected length is shown in darker grey, with off-target lengths shown in lighter grey. The plot legends summarize the on and off-target rates per library. Data used to generate these plots is included in Table 1.

[0046] FIG. 9: First copy consensus per template. For three libraries, the distribution of templates with x on-target first copies and y off-target first copies is plotted. The size of the dot and darkness of the shading reflect the proportion of templates, normalized by the total template count. Templates with no on-target first copies were further divided into “U” if all the first copies were unanimous for the same off-target length, or “M” if the first copies lengths were mixed. To highlight the population, unanimous off-target template populations are shown in the circles with x's through them (®).

[0047] FIG. 10: Mutagenesis library overview. Stages of a partial mutagenesis protocol are demonstrated for initial templates with different degrees of mutagenesis and disruption. Lighter grey arrows in the template indicate unites of a microsatellite repeat. The darker grey arrows in the template indicate mutation in that repeat unit. Length of the microsatellite sequence is indicated in the circle above the repeat. The original length of the initial template is L; increases in length are indicated by +1, +2, etc.; decreases in length are indicated by −1, −2, etc. Tags for the templates are #1, #2, etc. and tags for each first copy are #1A, #1B, . . . , #1N, etc. Stages 1˜4 are part of the sequencing library preparation. Stages 6, 7, and 8 illustrate results from data analysis. The distributions of lengths observed are plotted for reads, first copies, and templates, with on-target length L shaded lighter grey and off-target lengths shaded darker grey.

[0048] FIG. 11: Protocol for enriched sequencing library. The diagram shows a protocol for making sequencing libraries with partial bisulfite mutagenesis and hybridization capture enrichment of microsatellite loci from genomic DNA. In step 1, double stranded molecules are processed with end-polishing and A-tailing. In step 2, fish-tail adapters with varietal tags, sample barcodes, and universal primers are ligated to the double-stranded molecules. Sequences shown as empty boxes indicate no C's in the sequence. Step 3 is the hybridization capture panel based enrichment with the C containing strand as the target of this enrichment. Step 4 is partial bisulfite mutagenesis. Step 5 is multiple cycles of linear amplification using a universal primer and additional varietal tag. Step 6 is one cycle of linear amplification with a biotinylated oligo. Step 7 is purification of the biotinylated oligos and exponential amplification with the p5 and p7 primers to generate a DNA sequencing library. Libraries are then sequenced to generate sequencing read data.

[0049] FIG. 12: Coverage across panel loci. The number of reads mapped to each of 630 panel loci is shown as a ranked plot, with the locus with the most mapped reads on the right and the locus with the least mapped reads on the left. Coverage is relatively uniform for both the C panel (top) and AC panel (bottom) indicating even enrichment across the panel.

[0050] FIG. 13: Degrees of disruption. Examples of different degrees of disruption is shown for the same sequence, with 8 different levels of mutagenesis. The microsatellite sequence in the middle of the sequence is indicated with and C's that have been converted to T's via mutagenesis are bolded. The longest remaining repeat sequence is indicated with the horizontal bracket. The table on the right shows the overall conversion rate (percentage of C's in the full sequence converted to T); the MS conversion rate (percentage of C's in the 20 base microsatellite sequence converted to T); and the max repeat length (largest number of consecutive C's or T's in the sequence). No mutagenesis leads to a 0% overall and MS conversion rate, while full mutagenesis leads to a 100% overall and MS conversion rate, both with 20 base max repeat lengths. Partial mutagenesis may lead to a MS that is not disrupted, mildly disrupted, or highly disrupted, depending on the MS conversion rate and max repeat length remaining after mutagenesis.

[0051] FIG. 14: Distinguishing mixtures of populations with different microsatellite lengths. The diagram shows a conceptual example of microsatellite length distributions from different types of samples, with and without disrupting the microsatellite sequence. With disruption, the observed length distribution is a highly accurate representation of the true distribution. Without disruption, the observed distribution is a highly distorted representation of the true distribution. The first two rows show distributions from samples with only one microsatellite length (at a single locus), such as pure germline (dark grey) or pure tumor (black with white dots). The lower three rows show observed distributions when the tumor and germline are mixed (light grey), as is expected in a tumor biopsy, or in cell-free DNA. The distortion without disruption results in data that cannot reliably distinguish the presence of a rare microsatellite length from the tumor present in 1% of cell-free DNA from a case where no tumor DNA is present in the cell-free DNA (bottom two rows).

[0052] FIG. 15: Determining and detecting the tumor microsatellite signature in a tumor biopsy and cell-free DNA. The diagram shows a conceptual example of characterizing microsatellite lengths in a tumor biopsy and in cell-free DNA. The top panel shows the comparison of the MS length distributions in a tumor biopsy and a blood cell sample to determine that the length 17 (black with white dots) is associated with the tumor. The middle panel extends this comparison to many loci, identifying the tumor-associated length in black with white dots and determining which loci have a unique tumor-associated length that will be useful for distinguishing tumor from normal in a mixture. The bottom panel shows the frequencies of MS length variants that might be expected when examining those same loci in cell-free DNA before and after treatment.

[0053] FIG. 16: Early detection of a neoplasm from circulating cell-free DNA. The diagram shows a conceptual example of early detection of a neoplasm by monitoring microsatellite lengths in circulating cell-free DNA. For N loci (columns) MS length distributions are shown for the putative germline, where each locus has 1 or 2 lengths present (top panel). In the lower panels, the distributions are shown for the same loci in a baseline, +1 year, and +2 year samples. Dark grey indicates the majority germline length; black with white dots indicates a lower frequency somatic variation that is detected in both blood cells and the circulating cell-free DNA; light grey with black dots indicates a somatic variation that is not in the baseline and grows in frequency over time. The light grey with black dots length is not detected in the blood cells, indicating that it may arise from cells in a non-blood tissue. Its rapid expansion and presence only in cell-free DNA may indicate a rapid clonal expansion somewhere in the individual and may suggest more intensive cancer screenings for the individual at that time.

[0054] FIG. 17: Partial disruption lowers error rate of MSL in panel data, exactly as predicted. Using panels, microsatellites from loci were enriched, 630 with mononucleotide C repeats (top panel) and 630 with dinucleotide AC repeats (bottom panel), each of varying lengths (see X-axis). These enriched fragments were partially mutagenized with bisulfite, or not. Sequencing libraries were separately prepared from the mutagenized and unmutagenized fragments (top line in each graph). Following sequencing, the reads from the mutagenized library were scored as mutated but insufficiently disrupted (middle line in each graph) or sufficiently disrupted as described in the current application (bottom line in each graph). The error rate (Y-axis, log scale) is the proportion of PCR duplicates, defined by template tag and mapping, disagreeing for the MS length. Disagreements are assigned to the longer of the two lengths. 95% confidence intervals for the error rates are determined from the total number of observations using Jefferys interval, with intervals including zero truncated to 10⁻⁶. The expected error rate, based on the data for synthetic templates C-18 and AC-26, are indicated with the star shaded to match the corresponding case.

[0055] FIG. 18: Demonstration that directed partial bisulfite mutagenesis works. The figure shows every cytosine in the synthetic template: its position in the template displayed on the X-axis, and the proportion of conversion from C to T on the Y-axis. Panel A shows the proportion of conversion from C to T with templates alone, while Panels B and C show the proportion of conversion from C to T when blockers are used. In Panel B the reaction conditions were: 55 degrees centigrade for 30 minutes. In Panel C the reaction conditions were: 40 degrees for 70 minutes. The vertical lines denote the boundaries of the microsatellite.

[0056] FIG. 19: A plot of tumor vs normal eccentricity. For both high-MSI patients (53 and 55) the eccentricity in the tumor exceeded the blood in ˜94% of mono-C loci and ˜62% of di-AC loci. In contrast, in a low MSI patient (61), the tumor eccentricity exceeded the blood 51% of the time (practically random) and for the di-AC loci, the tumor eccentricity exceeded the blood 38% of the time.

[0057] FIG. 20: The distribution of mean eccentricity values for the three patients and the accompanying power curves computed using pure blood data as the null distribution.

### DETAILED DESCRIPTION OF THE INVENTION

[0058] This invention provides a method for measuring microsatellite lengths of initial nucleic acid templates each of which comprise a microsatellite and two flanking portions, which flanking portions delineate the microsatellite, the method comprising:
[0059] (a) generating partially mutagenized templates by:
   [0060] (i) partial mutagenesis of the initial nucleic acid templates;
   [0061] (ii) partial mutagenesis during production of first copies of the initial nucleic acid templates; and/or
   [0062] (iii) generating first copies of the initial nucleic acid templates followed by partial mutagenesis of the first copies of the initial nucleic acid templates;
[0063] (b) making a sequencing library from the partially mutagenized templates;
[0064] (c) sequencing the library from step (b) to generate sequence reads;
[0065] (d) selecting a set of sequence reads in which the microsatellite has been disrupted by mutagenesis so that
   [0066] (i) at least two, preferably more of the tandem repeat units in the microsatellite have been mutagenized; and
   [0067] (ii) the microsatellite in the sequence read has no more than 7, preferably 5 or fewer, tandem repeats in a row; and
[0068] (e) measuring microsatellite lengths from the set of sequence reads selected in step (d), wherein the measurement is the distance between the flanking portions that delineate the microsatellite of the initial templates.

[0069] This invention also provides a method for obtaining a distribution of microsatellite lengths from initial nucleic acid templates each of which comprise a microsatellite and two flanking portions, which define the microsatellite and its locus, the method comprising:
[0070] (a) generating partially mutagenized copies of the initial nucleic acid templates by:
   [0071] (i) partial mutagenesis of the initial nucleic acid templates;
   [0072] (ii) producing partially mutagenized first copies of the initial nucleic acid templates;
   [0073] (iii) producing first copies of the initial nucleic acid templates followed by partial mutagenesis of the first copies of the initial nucleic acid templates;
[0074] (b) sequencing the partially mutagenized copies of the initial nucleic acid templates to generate sequence reads,
[0075] (c) selecting a set of sequence reads in which the microsatellite has been disrupted by mutagenesis so that:
   [0076] (i) at least two, preferably more of the tandem repeat units in the microsatellite have been mutagenized;
   [0077] (ii) the microsatellite in the sequence read has no more than 7, preferably 5 or fewer, tandem repeats in a row; and
[0078] (d) measuring microsatellite lengths from the set of sequence reads selected in step (c) as the distance between the flanking portions that delineate the microsatellite of the initial templates, wherein a distribution of measured microsatellite lengths from the selected set of sequence reads corresponding to an individual locus is obtained.

[0079] In embodiments, as an alternative to the step of “selecting a set of sequence reads in which the microsatellite has been disrupted by mutagenesis so that (i) at least two, preferably more of the tandem repeat units in the microsatellite have been mutagenized, and (ii) the microsatellite in the sequence read has no more than 7, preferably 5 or fewer, tandem repeats in a row” in the methods described herein, the step instead comprises selecting a set of sequence reads in which the microsatellite exceeds a disruption index so that the error rate between matched pairs is less than 2%, or 1%, or preferably less than 0.5%; wherein matched pairs are independent reads that share a template, first copy, or locus. In this context, “independent reads” means two reads that do not come from the same sequencing library element.

[0080] Accordingly, this invention provides a method for measuring microsatellite lengths of initial nucleic acid templates each of which comprise a microsatellite and two flanking portions, which flanking portions delineate the microsatellite, the method comprising:
[0081] (a) generating partially mutagenized templates by:
   [0082] (i) partial mutagenesis of the initial nucleic acid templates;
   [0083] (ii) partial mutagenesis during production of first copies of the initial nucleic acid templates; and/or
   [0084] (iii) generating first copies of the initial nucleic acid templates followed by partial mutagenesis of the first copies of the initial nucleic acid templates; making a sequencing library from the partially mutagenized templates;
[0085] (c) sequencing the library from step (b) to generate sequence reads;
[0086] (d) selecting a set of sequence reads in which the microsatellite exceeds a disruption index so that the error rate between matched pairs is less than 2%, less than 1%, or preferably less than 0.5%, wherein matched pairs are independent reads that share a template, first copy, or locus; and
[0087] (e) measuring microsatellite lengths from the set of sequence reads selected in step (d), wherein the measurement is the distance between the flanking portions that delineate the microsatellite of the initial templates.

[0088] In embodiments, as an alternative to the step of “selecting a set of sequence reads in which the microsatellite has been disrupted by mutagenesis so that (i) at least two, preferably more of the tandem repeat units in the microsatellite have been mutagenized, and (ii) the microsatellite in the sequence read has no more than 7, preferably 5 or fewer, tandem repeats in a row” in the methods described herein, the step instead comprises selecting a set of sequence reads selects reads in which the microsatellite has been disrupted by mutagenesis sufficiently to reduce the replication error rate of the disrupted microsatellite to 10⁻¹ or less, preferably 10⁻² or less, or more preferably 10⁻³ or less. The error rate in this context is the proportion of duplicates that deviate from the actual microsatellite length. Error rates for a given degree of disruption can be estimated, for example, using a look-up table of disruption and error rates that was generated using synthetic templates of known composition and length.

[0089] Accordingly, this invention provides a method for measuring microsatellite lengths of initial nucleic acid templates each of which comprise a microsatellite and two flanking portions, which flanking portions delineate the microsatellite, the method comprising:
[0090] (a) generating partially mutagenized templates by:
   [0091] (i) partial mutagenesis of the initial nucleic acid templates;
   [0092] (ii) partial mutagenesis during production of first copies of the initial nucleic acid templates; and/or
   [0093] (iii) generating first copies of the initial nucleic acid templates followed by partial mutagenesis of the first copies of the initial nucleic acid templates;
[0094] (b) making a sequencing library from the partially mutagenized templates;
[0095] (c) sequencing the library from step (b) to generate sequence reads;
[0096] (d) selecting a set of sequence reads in which the microsatellite has been disrupted by mutagenesis sufficiently to reduce the replication error rate of the disrupted microsatellite to 10⁻² or less; and
[0097] (e) measuring microsatellite lengths from the set of sequence reads selected in step (d), wherein the measurement is the distance between the flanking portions that delineate the microsatellite of the initial templates.

### Partial Mutagenesis

[0098] In embodiments, the partial mutagenesis comprises:
[0099] (a) chemical mutagenesis;
[0100] (b) enzymatic mutagenesis;
[0101] (c) incorporating nonstandard nucleotides during a step of replication; or
[0102] (d) combinations thereof.

[0103] In embodiments, the partial mutagenesis comprises treating the initial nucleic acid template or a first copy of the initial nucleic acid template with an enzyme that deaminates nucleotides.

[0104] In embodiments, the enzyme that deaminates nucleotides is adenine deaminase.

[0105] In embodiments, the partial mutagenesis comprises deamination of cytosines, preferably deamination of cytosines by bisulfite mutagenesis.

[0106] In embodiments, the partial mutagenesis comprises nick translation of the initial nucleic acid template or a first copy of the initial nucleic acid template to replace nucleotides of the template with nonstandard nucleotides having altered base-pairing activity.

[0107] In embodiments, the partial mutagenesis comprises copying the initial nucleic acid templates or first copies of the initial nucleic acid templates in the presence of a mixture of standard nucleotides and nonstandard nucleotides to generate copies comprising standard and nonstandard nucleotides, wherein the nonstandard nucleotides have altered base-pairing activity.

[0108] In embodiments, the nonstandard nucleotides are deoxyinosine triphosphate.

[0109] In embodiments, the partial mutagenesis comprises:
[0110] (a) copying the initial nucleic acid templates or first copies of the initial nucleic acid templates in the presence of a mixture of standard nucleotides and nonstandard nucleotides to generate copies comprising standard and nonstandard nucleotides;
[0111] (b) subjecting the copies comprising standard and nonstandard nucleotides to a chemical or enzymatic treatment that alters the base-pairing activity of a standard nucleotide without altering the base-pairing activity of its corresponding nonstandard nucleotide.

[0112] In embodiments, the nonstandard nucleotides are 5-methylcytosine

[0113] In embodiments, the chemical or enzymatic treatment comprises:
[0114] (a) using a TET2 enzyme to oxidize 5-methylcytosine into 5-carboxycytosine; and
[0115] (b) using an APOBEC enzyme to convert cytosines to uracils.

[0116] In embodiments, the partial mutagenesis is followed by production of first copies in the presence of a mixture of 5-methyl-dCTP and standard nucleotides, preferably wherein 5-methyl-dCTP is present in the mixture at about the same concentration as dCTP.

[0117] In embodiments, the partial mutagenesis comprises:
[0118] (a) copying the initial nucleic acid templates or first copies of the initial nucleic acid templates in the presence of a mixture of standard nucleotides and nonstandard nucleotides to generate copies comprising standard and nonstandard nucleotides;
[0119] (b) subjecting the copies comprising standard and nonstandard nucleotides to a chemical or enzymatic treatment that alters the base-pairing activity of the nonstandard nucleotide without altering the base-pairing activity of its corresponding standard nucleotide.

[0120] In embodiments, the method comprises a step of protecting the flanking portions of the initial nucleic acid templates or first copies of the initial nucleic acid templates from partial mutagenesis.

[0121] In embodiments, protecting the flanking portions of the initial nucleic acid templates or first copies of the initial nucleic acid templates comprises using an excess of oligonucleotides complementary to the flanking portions to protect the flanking portions from partial mutagenesis, preferably wherein the partial mutagenesis comprises deamination of cytosines, preferably deamination of cytosines by bisulfite mutagenesis.

### Initial Templates

### Sources

[0122] In embodiments, the initial nucleic acid templates:
[0123] (a) are from a biological sample;
[0124] (b) are copies of nucleic acids from a biological sample; or
[0125] (c) are synthetic templates.

[0126] In embodiments, the initial nucleic acid templates are from a biological sample or are copies of nucleic acids from a biological sample, and the biological sample is:
[0127] (a) from a tissue biopsy;
[0128] (b) from blood or a blood product;
[0129] (c) from excreta, preferably urine or fecal matter; or
[0130] (d) sputum.

[0131] In embodiments, the initial nucleic acid templates are synthetic templates, wherein the synthetic templates each comprise two flanking portions and a microsatellite of known composition and length, each optionally comprising a varietal tag, a sample barcode, and/or a universal primer binding site, wherein the microsatellite:
[0132] (a) comprises nucleotides susceptible to being altered by the step of partial mutagenesis; or
[0133] (b) comprises a known pattern of mutation.

### Fragmentation

[0134] In embodiments, the initial nucleic acid templates were prepared by random fragmentation of nucleic acids.

[0135] In embodiments, the random fragmentation was by:
[0136] (a) a natural process, preferably degradation of nucleic acids;
[0137] (b) shearing; and/or
[0138] (c) endonucleases.

[0139] In embodiments, the initial nucleic acid templates were prepared by restriction endonuclease cleavage of nucleic acids

### Enrichment

[0140] In embodiments, the initial nucleic acid templates are in a sample that has been enriched for microsatellites by a panel comprising oligonucleotides with sequence complementarity to:
[0141] (a) one or more microsatellite flanking portions; or
[0142] (b) a microsatellite repeat motif.

[0143] In embodiments, the initial nucleic acid templates are in a sample enriched for microsatellites and the method comprises a step of enriching a sample comprising a population of nucleic acid templates for microsatellites using a panel comprising oligonucleotides with sequence complementarity to:
[0144] (a) one or more microsatellite flanking portions;
[0145] (b) a microsatellite repeat motif.

[0146] In embodiments, step (a) comprises a step of enriching partially mutagenized templates for microsatellites using a panel comprising oligonucleotides with sequence complementarity to:
[0147] (a) one or more microsatellite flanking portions; or
[0148] (b) a microsatellite repeat motif.

[0149] In embodiments, the panel is:
[0150] (a) a panel of hybridization capture probes; or
[0151] (b) a panel of primers to initiate replication.

### Individual Identifiers

[0152] In embodiments, the initial nucleic acid templates and/or first copies thereof comprise one or more individual identifiers.

[0153] In embodiments, the one or more individual identifiers comprise:
[0154] (a) fragment end sequences if the initial nucleic acid template is from a biological sample and is randomly fragmented;
[0155] (b) fragment end sequences if the initial nucleic acid template was prepared using random fragmentation;
[0156] (c) a mutational pattern caused by the step of partial mutagenesis, wherein the step of partial mutagenesis is partial random mutagenesis;
[0157] (d) a varietal tag attached to the initial nucleic acid templates or first copies of the initial nucleic acid templates;
[0158] (e) a sequence of the flanking portions of the microsatellite, which:
   [0159] (i) specify the locus of the microsatellite in a reference genome if the initial nucleic acid template is from a biological sample; or
   [0160] (ii) specify a synthetic nucleic acid molecule if the initial nucleic acid template is a synthetic template; or
[0161] (f) any combination of the above.

### Adaptors

[0162] In embodiments, the initial nucleic acid templates comprise one or more adaptors, preferably wherein the one or more adaptors convey template identity and/or sample identity.

[0163] In embodiments, the one or more adaptors comprise one or more or all of the following:
[0164] (a) a varietal tag;
[0165] (b) a sample barcode;
[0166] (c) a universal primer binding site;
[0167] (d) a purification moiety, preferably biotin; and
[0168] (e) a sequencing primer binding site.

[0169] In embodiments, the one or more adaptors consist of nucleotides that are:
[0170] (a) not susceptible to being altered in the step of partial mutagenesis; or
[0171] (b) complementary to nucleotide that are not susceptible to being altered in the step of partial mutagenesis.

[0172] In embodiments, the one or more adaptors are added to the initial nucleic templates, first copies of the initial nucleic acid templates, and/or partially mutagenized copies of the initial nucleic acid templates by:
[0173] (a) ligation; or
[0174] (b) primer extension.

[0175] In embodiments, the one or more adaptors have a fish-tail structure.

### First Copies

[0176] In embodiments, step (a), part (i) comprises generating first copies of the partially mutagenized templates.

[0177] In embodiments, one or more adaptors are added to the first copies.

[0178] In embodiments, the one or more adaptors comprise one or more or all of the following:
[0179] (a) a varietal tag;
[0180] (b) a sample barcode;
[0181] (c) a universal primer binding site; and
[0182] (d) a purification moiety, preferably biotin.

### Preparing Sequencing Libraries

[0183] In embodiments, step (b) comprises amplification of the partially mutagenized templates.

[0184] In embodiments, amplification comprises linear amplification, exponential amplification, or both.

[0185] In embodiments, amplification is with:
[0186] (a) a DNA polymerase;
[0187] (b) a RNA polymerase; or
[0188] (c) a reverse transcriptase.

[0189] In embodiments, amplification is with primers consisting of nucleotides that are not susceptible to being altered in the step of partial mutagenesis.

[0190] In embodiments, the partially mutagenized templates comprise a purification moiety and step (b) comprises purifying the partially mutagenized templates using the purification moiety, preferably prior to a step of exponential amplification, preferably wherein the purification moiety is biotin and the partially mutagenized templates are purified by binding of the purification moiety to streptavidin.

[0191] In embodiments, step (b) comprises enriching the partially mutagenized templates for microsatellites, before or after amplification.

[0192] In embodiments, enriching is with a panel comprising oligonucleotides with sequence complementarity to:
[0193] (a) one or more microsatellite flanking portions; or
[0194] (b) a microsatellite repeat motif.

[0195] In embodiments, the panel is:
[0196] (a) a panel of hybridization capture probes; or
[0197] (b) a panel of primers to initiate replication.

[0198] In embodiments, amplification is by polymerase chain reaction (PCR).

[0199] In embodiments, step (b) comprises end-polishing, A-tailing, and sequencing adaptor ligation.

### Sequence Reads

[0200] In embodiments, the sequence reads:
[0201] (a) are single reads or paired end reads;
[0202] (b) have sample barcode sequences; and/or
[0203] (c) have varietal tag sequences.

### Microsatellites

[0204] In embodiments, the microsatellites:
[0205] (a) are at least four repeat units in length;
[0206] (b) comprise repeat units, each of which is no more than 10 nucleotides;
[0207] (c) are at least 12 nucleotides in length;
[0208] (d) are mononucleotide tracts, preferably mono-C tracts;
[0209] (e) are dinucleotide tracts, preferably C/G tracts or C/A tracts;
[0210] (f) comprise cytosines;
[0211] (g) comprise adenines;
[0212] (h) are susceptible to a method of partial mutagenesis;
[0213] (i) are known to have unstable replication;
[0214] (j) are more than 5 repeat units in length, more than 7 repeat units in length, more than 10 repeat units in length, more than 15 repeat units in length, more than 20 repeat units in length, more than 30 repeat units in length, between 6 and 70 repeat units in length, between 6 and 32 repeat units in length or between 12 and 64 repeat units in length; and/or
[0215] (k) are from a genome of an organism and adjoin flanking portions in the genome of the organism, wherein a flanking portion together with the microsatellite map uniquely to the genome to define the locus of the microsatellite, and wherein the flanking portions delineate the length of the microsatellite.

### Provenance

[0216] In embodiments, the method comprises establishing one or more provenances of the sequence reads.

[0217] In embodiments, the one or more provenances are:
[0218] (a) a locus in a reference genome and the provenance is established using a sequence in one or both of the flanking portions;
[0219] (b) a synthetic nucleic acid template and the provenance is established using a sequence in one or both of the flanking portions;
[0220] (c) an initial nucleic acid template with a specific individual identifier and the provenance is established using said individual identifier;
[0221] (d) a first copy of an initial nucleic acid template with a specific individual identifier and the provenance is established using said individual identifier;
[0222] (e) a partially mutagenized template with a specific individual identifier and the provenance is established using said individual identifier;
[0223] (f) a partially mutagenized first copy of an initial nucleic acid template with a specific individual identifier and the provenance is established using said individual identifier;
[0224] (g) a sample with a specific sample barcode and the provenance is established using said sample barcode; and/or
[0225] (h) a partially mutagenized template with a specific degree of microsatellite disruption preferably wherein the provenance is established based a common maximum repeat length and/or a common proportion of mutagenized bases.

[0226] In embodiments, the individual identifier comprises:
[0227] (a) fragment end sequences if the initial nucleic acid template is from a biological sample and is randomly fragmented;
[0228] (b) fragment end sequences if the initial nucleic acid template was prepared using random fragmentation;
[0229] (c) a mutational pattern caused by the step of partial mutagenesis, wherein the step of partial mutagenesis is partial random mutagenesis;
[0230] (d) a varietal tag attached to the initial nucleic acid templates or first copies of the initial nucleic acid templates;
[0231] (e) a sequence of the flanking portions of the microsatellite, which
   [0232] (i) specify the locus of the microsatellite in a reference genome if the initial nucleic acid template is from a biological sample; or
   [0233] (ii) specify a synthetic nucleic acid molecule if the initial nucleic acid template is a synthetic template; or
[0234] (f) any combination of the above.

### Distributions

[0235] In embodiments of the method for obtaining a distribution of microsatellite lengths from initial nucleic acid templates, step (c) or (d) comprises applying a consensus rule to the sequence reads or set of selected sequence reads, so that the distribution of measured microsatellite lengths is from:
[0236] (a) a set of consensus lengths identified as originating from the same first copies;
[0237] (b) a set of consensus lengths identified as originating from the same initial nucleic acid templates;
[0238] (c) a set of consensus lengths identified as originating from the same first copies and initial nucleic acid templates.

[0239] In embodiments, the consensus rule assigns a microsatellite length to sequence reads originating from the same first copy or initial nucleic acid template if:
[0240] (a) a microsatellite length is agreed upon by at least P % of sequence reads originating from the same first copy or initial nucleic acid template, wherein there is no microsatellite length in said sequence reads originating from the same first copy or initial nucleic acid template found more frequently that P %, preferably wherein P is a value from 30 to 100;
[0241] (b) a microsatellite length is agreed upon by a plurality of sequence reads originating from the same first copy or initial nucleic acid template; or
[0242] (c) a microsatellite length is agreed upon by all sequence reads originating from the same first copy or initial nucleic acid template.

[0243] In embodiments, sequence reads are identified as originating from the same initial nucleic acid template or first copy of initial template nucleic acid template based on:
[0244] (a) fragment end sequences;
[0245] (b) a mutational pattern caused by the step of partial mutagenesis, if the partial mutagenesis is partial random mutagenesis; or
[0246] (c) one or more varietal tags attached to the initial nucleic acid templates or first copies of the initial nucleic acid templates.

[0247] In embodiments, the distribution of microsatellite lengths in the initial nucleic acid templates consists of:
[0248] (a) a distribution of microsatellite lengths at an individual locus;
[0249] (b) a set of distributions of microsatellite lengths at two or more individual loci.

[0250] In embodiments of the methods of measuring microsatellite lengths, the method further comprises generating a distribution of microsatellite read lengths by counting the number of microsatellites of a given length across all measured microsatellite lengths in a set of sequence reads having a shared provenance, wherein the shared provenance is selected from the group consisting of:
[0251] (a) sample;
[0252] (b) locus;
[0253] (c) synthetic template;
[0254] (d) initial template identity;
[0255] (e) first copy identity; or
[0256] (f) degree of disruption.

[0257] In embodiments, the method comprises generating a distribution of consensus microsatellite lengths, wherein:
[0258] (a) the consensus microsatellite lengths derive from the distribution of microsatellite read lengths over a set of identified templates by applying a consensus rule;
[0259] (b) the consensus microsatellite lengths derive from the distribution of microsatellite read lengths over a set of identified first copies by applying a consensus rule; or
[0260] (c) the consensus microsatellite lengths derive from a distribution of consensus microsatellite lengths over a set of identified first copies sharing a set of identified initial nucleic acid templates by applying a consensus rule.

[0261] In embodiments, the consensus rule is chosen from the group consisting of:
[0262] (a) a unanimity rule, in which the consensus microsatellite length is the only microsatellite length in the distribution and all other microsatellite lengths have a count of zero;
[0263] (b) a plurality rule, in which the consensus microsatellite length is the most common microsatellite length in the distribution;
[0264] (c) the majority P-rule, in which the consensus microsatellite length is the microsatellite length with a count that is greater than or equal to N×P where N is the total number of microsatellite lengths and P is greater than or equal to 0.5.

[0265] In embodiments:
[0266] (a) the sequencing library is enriched for microsatellites by a panel comprising oligonucleotides with sequence complementarity to one or more microsatellite flanking portions at one or more loci and optionally comprises synthetic nucleic acid templates of known microsatellite composition, length, and degree of disruption; and
[0267] (b) distributions of microsatellite lengths at one or more loci are generated by:
   [0268] (i) using an exact matching algorithm to identify matches between the sequence reads and an alignment index database, wherein the alignment index database comprises, for each locus corresponding to a microsatellite of the panel and for each synthetic nucleic acid template, if present:
      [0269] (1) a subsequence for each flanking portion and all possible variations that can arise from partial mutagenesis; and
      [0270] (2) the distance of each said subsequence to the microsatellite;
   [0271] (ii) for each sequence read that matches a subsequence of the alignment index database measuring the microsatellite length using the distance in the alignment index database; and
   [0272] (iii) counting the number of microsatellites of a given length across all measured microsatellite lengths in a set of sequence reads having a shared provenance, wherein the shared provenance is selected from the group consisting of:
      [0273] (1) sample;
      [0274] (2) locus;
      [0275] (3) synthetic template;
      [0276] (4) initial template identity;
      [0277] (5) first copy identity; or
      [0278] (6) degree of disruption.

### Look-Up Tables

[0279] In embodiments, the step of selecting a set of sequence reads comprises:
[0280] (a) using a look-up table of disruption and error rates to estimate the replication error associated with a given pattern of disruption in a sequence read;
[0281] (b) selecting sequence reads based on the estimated replication error.

[0282] In embodiments, the look-up table of disruption and error rates was generated using synthetic templates that match the microsatellite tracts of the initial templates in composition and length.

[0283] In embodiments, the look-up table of disruption and error rates was generated by:
[0284] (a) preparing distributions of read lengths and consensus read lengths of synthetic nucleic acid templates of known microsatellite composition, length, and degree of disruption;
[0285] (b) from the distributions of read lengths and consensus read lengths, estimating an error rate per round of replications as a function of the degree of disruption;
[0286] (c) from the estimated error rate per round of replication, generating a look-up table of the moments of error as a function of the degree of disruption and number of rounds of replication.

[0287] Accordingly, this invention provides a method for generating a look-up table to estimate the replication error associated with a given pattern of disruption in a sequence read.

### Reports

[0288] In embodiments, the methods described herein further comprise a step of generating a report based on the measured microsatellite lengths. A person skilled in the art will appreciate that such a report may include any information that is produced by the methods described herein. For example, where applicable and without limitation, the report may include the measured microsatellite lengths at one or more loci and the confidence interval of these measurements.

[0289] Accordingly, this invention also provides reports produced according the methods described herein.

### Applications

[0290] This invention also provides a method for obtaining a distribution of microsatellite lengths of nucleic acid templates from two or more samples derived from the same organism, the method comprising:
[0291] (a) performing any of the methods for obtaining a distribution of microsatellite lengths described herein on the two or more samples derived from the same organism to thereby determine the distribution of microsatellite lengths in initial nucleic acid templates in each of the two or more samples; and
[0292] (b) combining the distribution of microsatellite lengths in initial nucleic acid templates in each of the two or more samples.

[0293] In embodiments, the two or more samples are derived from:
[0294] (a) different tissues of the organism; and/or
[0295] (b) the same tissue of the organism sampled at different times.

[0296] This invention also provides a method for detecting microsatellite length variation (MSLV) in initial nucleic acid templates of a first sample derived from an organism:
[0297] (a) performing any of the methods for obtaining a distribution of microsatellite lengths described herein on the sample to thereby determine the distribution of microsatellite lengths in initial nucleic acid templates in the first sample; and
[0298] (b) comparing the distribution of microsatellite lengths in initial nucleic acid templates in the first sample to a reference distribution, wherein the reference distribution was produced from a sample derived from the same organism according to the same method.

[0299] In embodiments, the reference distribution was produced from a sample derived from a different tissue of the organism than the first sample.

[0300] In embodiments, the comparison of distributions is used to infer the somatic MSLV of the first sample.

[0301] In embodiments, the first sample, or the sample from which the reference distribution was produced, is derived from a neoplasm.

[0302] In embodiments, the reference distribution was produced from a sample derived from the same tissue of the organism as the first sample, sampled at a different time.

[0303] In embodiments, the comparison of distributions is used to determine residual neoplasm following therapy.

[0304] In embodiments, the comparison of distributions is used to detect the presence or absence of clonal growth in the tissue.

[0305] In embodiments, the clonal growth is a previously undetected neoplasm.

[0306] A method for detecting microsatellite length variation (MSLV) in initial nucleic acid templates of two or more samples derived from the same organism, the method comprising:
[0307] (a) performing any of the methods for obtaining a distribution of microsatellite lengths described herein on the two or more samples derived from the same organism to thereby determine the distribution of microsatellite lengths in initial nucleic acid templates in each of the two or more samples; and
[0308] (b) comparing the distribution of microsatellite lengths in initial nucleic acid templates in each of the two or more samples.

[0309] In embodiments, the two or more samples:
[0310] (a) are derived from different tissues of the organism; and/or
[0311] (b) are derived from the same tissue of the organism sampled at different times.

[0312] In embodiments, the two or more samples are derived from different tissues of the organism and the comparison of distributions is used to infer the somatic MSLV of each sample.

[0313] In embodiments, one of the two or more samples is derived from a neoplasm.

[0314] In embodiments, the two or more samples are derived from the same tissue of the organism sampled at different times and the comparison of distributions is used to determine residual neoplasm following therapy.

[0315] In embodiments, the two or more samples are derived from the same tissue of the organism sampled at different times and the comparison of distributions is used to detect the presence or absence of clonal growth in the tissue.

[0316] In embodiments, the clonal growth is a previously undetected neoplasm.

[0317] A method for detecting the presence or absence of clonal populations of cells in a tissue of an organism, the method comprising performing any of the methods for obtaining a distribution of microsatellite lengths described herein on a sample derived from a single tissue of the organism to detect the presence or absence of minor variant microsatellite lengths, wherein the presence or absence of minor variant microsatellite lengths indicate the presence or absence of a clonal population of cells.

[0318] In embodiments, the clonal population of cells is a previously undetected neoplasm.

[0319] In embodiments, the comparison is used to detect the presence or absence of a disease in the organism.

[0320] This invention also provides a method for detecting the presence or absence of a rare microsatellite length (MSL) in a population, the method comprising:
[0321] (a) performing any of the methods for obtaining a distribution of microsatellite lengths described herein on a sample derived from an individual in the population to thereby determine the distribution of microsatellite lengths in initial nucleic acid templates in the sample;
[0322] (b) comparing the distribution of microsatellite lengths in initial nucleic acid templates in the sample to a distribution of microsatellite lengths in the population that was prepared by the same method to thereby detect the presence or absence of a rare MSL.

[0323] In embodiments, the method is used to detect a rare MSL in:
[0324] (a) sperm cells;
[0325] (b) eggs;
[0326] (c) embryos;
[0327] (d) a fetus;
[0328] (e) a biological sample of unknown origin;
[0329] (f) a population of biological samples, preferably wherein the population of biological samples is mass-produced;
[0330] (g) animals;
[0331] (h) gametes of animals
[0332] (i) plants;
[0333] (j) gametes of plants;
[0334] (k) livestock;
[0335] (l) gametes of livestock;
[0336] (m) crops; or
[0337] (n) gametes of crops.

[0338] This invention also provides a method of selective breeding comprising:
[0339] (a) using the method of detecting a rare MSL on one or more individuals in a population to detect the presence or absence of a rare MSL in the one or more individuals of the population;
[0340] (b) selecting an individual in the population based on the presence or absence of a rare MSL detected in step (a); and producing one or more individuals or one or more generations of individuals from reproductive material of the individual selected in step (b).

[0341] In embodiments, the method comprises estimating a confidence interval for the proportion of initial templates with a microsatellite length L at a single locus in a single sample, wherein the confidence interval is estimated using the distribution of measured microsatellite lengths in reads with a given degree of disruption and a look-up table of disruption and error rates.

[0342] In embodiments, the look-up table of disruption and error rates was generated using synthetic templates that match the microsatellite tracts of the initial templates in composition and length.

[0343] In embodiments, the look-up table of disruption and error rates was generated by:
[0344] (a) preparing distributions of read lengths and consensus read lengths of synthetic nucleic acid templates of known microsatellite composition, length, and degree of disruption;
[0345] (b) from the distributions of read lengths and consensus read lengths, estimating an error rate per round of replications as a function of the degree of disruption;
[0346] (c) from the estimated error rate per round of replication, generating a look-up table of the moments of error as a function of the degree of disruption and number of rounds of replication.

[0347] In embodiments, the confidence interval is used:
[0348] (a) to determine the profile of microsatellite length variation in a tumor;
[0349] (b) to genotype an individual;
[0350] (c) to detect disease loci;
[0351] (d) for early detection of cancer; or
[0352] (e) to determine the health of a sampled tissue.

[0353] This invention also provides a method of comparing two or more samples over one or more microsatellite loci for microsatellites of length L comprising:
[0354] (a) estimating a confidence interval for each sample, each locus, and each microsatellite length L according to any of the above methods; and
[0355] (b) comparing the estimated confidence intervals.

[0356] In embodiments, the two or more samples are from:
[0357] (a) different tissues of the same person, preferably a tumor biopsy and a blood sample;
[0358] (b) same tissues sampled at different times, preferably blood, before and after a treatment;
[0359] (c) same tissue, fractionated into components, preferably blood cells and cell-free components of blood; or
[0360] (d) different persons, preferably for forensics, parentage determination, and population studies.

[0361] This invention also provides a method of measuring deviation of microsatellite lengths at one or more loci in a sample relative to microsatellite lengths (A, B) at the one or more loci of a mono-allelic or bi-allelic baseline sample, the method comprising:
[0362] (a) determining a distribution of microsatellite lengths P(l) in the sample at each of the one or more loci according to any of the methods described herein for determining a distribution of microsatellite lengths,
[0363] (b) calculating a K-eccentricity E_{K}(A,B,P) of the sample to the baseline sample at each of the one or more loci, wherein for a given locus with baseline microsatellite lengths (A, B)

$${E}_{K} ( A , B , P ) = {\sum }_{l} P ( l ) min {( \vert A - l \vert , \vert B - l \vert )}^{K}$$

[0364] wherein K is a positive integer and the K-eccentricity E_{K}(A,B,P) is a measure of the deviation of microsatellite lengths at each locus in the sample relative to the microsatellite lengths (A, B) at the locus of a mono-allelic or bi-allelic baseline sample.

[0365] In embodiments of the invention, the mono-allelic or bi-allelic baseline sample is a germline sample. In embodiments of the invention, the sample is a blood sample, preferably blood cells or cell-free component of the blood sample. In embodiments of the invention, the sample is a sample from a tumor.

[0366] In embodiments of the invention, the method further comprises:
[0367] (a) calculating the mean K-eccentricity of all mono-C and all d-AC loci of the sample for which a distribution of microsatellite lengths P(l) was determined; and/or
[0368] (b) calculating the mean K-eccentricity of all mono-C and all d-AC loci that exhibit low eccentricity in a normal sample.

### Sequencing Libraries, Composition of Matter

[0369] This invention also provides a sequencing library comprising nucleic acid templates, wherein at least 5%, preferably at least 10%, more preferably at least 20%, and more preferably at least 30% of the nucleic acid templates comprise:
[0370] (a) a mutagenized microsatellite in which:
   [0371] (i) at least two, preferably more of the tandem repeat units in the microsatellite have been mutagenized; and
   [0372] (ii) the mutagenized microsatellite has no more than 7, preferably 5 or fewer, tandem repeats in a row; and
[0373] (b) two flanking portions.

[0374] In embodiments, the sequencing library comprises at least 100, at least 1,000, at least 1×10⁴, at least 3×10⁴, or at least 6×10⁴ nucleic acid templates.

[0375] In embodiments, the sequencing library was enriched from a whole genome.

[0376] This invention also provides a sequencing library comprising nucleic acid templates that have been partially mutagenized according to any of the methods of directed partial mutagenesis described herein, i.e. the methods of partial mutagenesis in which the flanking portions are protected from partial mutagenesis.

[0377] This invention also provides a sequencing library comprising nucleic acid templates which comprise:
[0378] (a) a mutagenized microsatellite in which:
   [0379] (i) at least two, preferably more of the tandem repeat units in the microsatellite have been mutagenized; and
   [0380] (ii) the mutagenized microsatellite has no more than 7, preferably 5 or fewer, tandem repeats in a row; and
[0381] (b) flanking portions which are not mutagenized.

[0382] This invention also provides a whole genome sequencing library comprising nucleic acid templates according to the above two embodiments, i.e. where the nucleic acid templates of the whole genome sequencing library have been subjected to directed partial mutagenesis.

### Panels, Compositions of Matter

[0383] This invention also provides a panel comprising a set of 6 or more oligonucleotides with sequences complementary to the flanking portions of microsatellites that are susceptible to the partial mutagenesis described in any of the above embodiments.

[0384] In embodiments:
[0385] (a) the microsatellites are at least four repeat units in length;
[0386] (b) the microsatellites comprise repeat units, each of which is no more than 10 nucleotides;
[0387] (c) the microsatellites are at least 12 nucleotides in length;
[0388] (d) the microsatellites are mononucleotide tracts, preferably mono-C tracts;
[0389] (e) the microsatellites are dinucleotide tracts, preferably C/G tracts or C/A tracts;
[0390] (f) the microsatellites comprise cytosines;
[0391] (g) the microsatellites comprise adenines;
[0392] (h) the microsatellites are known to have repeat length variability;
[0393] (i) the microsatellites are more than 5 repeat units in length, more than 7 repeat units in length, more than 10 repeat units in length, more than 15 repeat units in length, more than 20 repeat units in length, more than 30 repeat units in length, between 6 and 70 repeat units in length, between 6 and 32 repeat units in length or between 12 and 64 repeat units in length;
[0394] (j) the microsatellite comprises a flanking portion which, together with the microsatellite, maps uniquely to the genome; and/or
[0395] (k) the oligonucleotides are complementary to flanking portions that do not hybridize to other flanking portions.

[0396] In embodiments, the panel is:
[0397] (a) a panel of hybridization capture probes; or
[0398] (b) a panel of primers to initiate replication.

[0399] In embodiments of the panel, the sequences of the oligonucleotides are complementary to one or more of the sequences set forth in SEQ ID NOs: 1-1260 and 1891-3150.

### Kits

[0400] This invention also provides a kit for performing the methods described herein.

[0401] In embodiments, the kit comprises the panels described herein.

[0402] In embodiments, the kit further comprises one or more or all of the following:
[0403] (a) synthetic nucleic acid templates, each comprising two flanking portions and a microsatellite of known composition and length, each optionally comprising a varietal tag, a sample barcode, and/or a universal primer binding site, wherein the microsatellite:
   [0404] (i) comprises nucleotides susceptible to being altered by a step of partial mutagenesis; or
   [0405] (ii) comprises a known pattern of mutation;
[0406] (b) oligonucleotide adaptors, optionally fish-tail adaptors, each of which comprise one or more of the following:
   [0407] (i) a varietal tag;
   [0408] (ii) a sample barcode;
   [0409] (iii) a universal primer binding site; and
   [0410] (iv) a purification moiety, preferably biotin;
[0411] (c) primers to initiate replication, wherein the primers are complementary to:
   [0412] (i) a universal primer binding site;
   [0413] (ii) a flanking portion of a synthetic nucleic acid template;
   [0414] (iii) a flanking portion of an initial nucleic acid template, which initial nucleic acid templates comprise a microsatellite and two flanking portions, optionally wherein the sequences of the primers are complementary to one or more of the sequences set forth in SEQ ID NOs: 1-1260 and 1891-3150; and/or
   [0415] (iv) a flanking portion of a first copy of an initial nucleic acid template, which initial nucleic acid templates comprise a microsatellite and two flanking portions; and
[0416] (d) a set of oligonucleotide blockers complementary to flanking portions of the microsatellites of the panel, optionally wherein the sequences of the oligonucleotide blockers are complementary to one or more of the sequences set forth in SEQ ID NOs: 1-1260 and 1891-3150;
[0417] wherein the oligonucleotide adaptors and primers to initiate replication preferably consist of nucleotides which (1) are not susceptible to being altered by a step of partial mutagenesis, and/or (2) are complementary to nucleotides which are not susceptible to being altered by a step of partial mutagenesis.

[0418] In embodiments, the kit further comprises:
[0419] (a) enzymes or chemicals for partial mutagenesis of nucleic acid templates; and/or
[0420] (b) computer-readable media comprising:
   [0421] (i) an alignment index database comprising, for each locus corresponding to a microsatellite of the panel of the kit, and for each synthetic nucleic acid template of the kit, if present:
      [0422] (1) a subsequence for each flanking portion and all possible variations that can arise from partial mutagenesis; and
      [0423] (2) the distance of each said subsequence to the microsatellite; and
   [0424] (ii) software for matching sequence reads to subsequences of the alignment index database.

[0425] In embodiments, the kit comprises:
[0426] (a) double-stranded synthetic nucleic acid templates, comprising a flanking portion complementary to a sequence of the panel;
[0427] (b) single-stranded synthetic nucleic acid templates, each comprising a microsatellite comprising nucleotides susceptible to being altered by a step of partial mutagenesis; and
[0428] (c) single-stranded synthetic nucleic acid templates, each comprising a microsatellite with a known pattern of mutation.

### Alternatives

[0429] A person skilled in the art will readily appreciate that an equivalent alternative to generating partially mutagenized templates for the purposes of the methods described herein is to obtain partially mutagenized templates that have been prepared by partial mutagenesis as described herein. Accordingly, for each embodiment of the invention which includes a step of generating partially mutagenized templates, there is an alternative embodiment wherein the step of generating partially mutagenized templates is replaced by a step of obtaining (for example from a third party) partially mutagenized templates that were produced by partial mutagenesis.

[0430] Similarly, a person skilled in the art will readily appreciate that an equivalent alternative to making a sequencing library for the purposes of the methods described herein is to obtain a sequencing library comprising mutagenized templates wherein said mutagenized templates are ready for sequencing (i.e. the sequencing library comprises mutagenized templates that have been replicated sufficiently to be sequenced and may comprise sequencing-platform specific adaptors). Accordingly, for each embodiment of the invention which includes a step of making a sequencing library, there is an alternative embodiment wherein the step of making a sequencing library is replaced by a step of obtaining a sequencing library comprising mutagenized templates (for example from a third party), followed by sequencing of the sequencing library.

[0431] Further, a person skilled in the art will readily appreciate that an equivalent alternative to sequencing the sequencing library for the purposes of the methods described herein is to obtain sequence reads of the sequencing library (for example from a third party). Accordingly, for each embodiment of the invention which includes a step of sequencing a sequencing library, there is an alternative embodiment wherein the step of sequencing the sequencing library is replaced by a step of obtaining sequence reads from a sequencing library.

[0432] In an embodiment, the method comprises a step of generating a distribution of measured microsatellite lengths from the selected set of sequence reads at an individual locus. As discussed herein, this distribution is representative of the distribution of microsatellite lengths in the initial nucleic acid templates at that individual locus. In an embodiment, the method comprises a step of generating a set of distributions of measured microsatellite lengths at two or more individual loci from the selected set of sequence reads. As discussed herein, each distribution in the set of distributions is representative of the distribution of microsatellite lengths in the initial nucleic acid templates at each given individual locus.

[0433] In an embodiment, the method comprises determining the degree of disruption of the tandem repeat structure in the sequence reads prior to the step of selecting a set of sequence reads.

### Terms and Concepts

[0434] Unless otherwise defined, all technical and scientific terms used herein have the same meaning as commonly understood by a person of ordinary skill in the art to which this invention belongs. As used herein, and unless stated otherwise, each of the following terms shall have the definition set forth below.

[0435] About: In the context of a numerical value or range means±10% of the numerical value or range recited or claimed, unless the context requires a more limited range.

[0436] Microsatellite: A microsatellite (MS) is a portion of the genome comprised of tandem repeats of a simple sequence. An MS is characterized by that repeat unit, the number of repeat units, and the total length which equals the number of repeats times the length of the repeat. For example in the FIG. 1, the microsatellite is a mononucleotide repeat, of 17 units, and a total length of 17. Each microsatellite has flanking sequences that place a given MS at a specific locus in the genome. The distance between the flanking sequences determines the microsatellite length (see FIG. 2). There are millions of microsatellites in the genome of complex organisms such as humans. Avvaru, A. K., et al., 2020 provides a database of microsatellites in the human genome, and the genomes of other organisms, which can be searched by repeat unit, location and flanking sequence. The database may be found at the following top-level domain: data.ccmb.res.in.

[0437] Biological variability of microsatellites: The tandem repeat structure of a microsatellite gives rise to high variability during replication, most frequently losses or gains of some number of the repeat unit. Microsatellites replicate during new cell growth, and as such, in a population of organisms or cells, the microsatellite lengths over any given locus form a distribution reflecting the history of that population. Variations in microsatellite length can be used to distinguish individual organisms, useful in forensics, genetic testing or breeding. Due to their instability, variations in microsatellite lengths can also cause genetic disorders (i.e. Huntington's Disease (Snell, R. G., et al. 1993), fragile X syndrome (Verkerk, A. J. et al. 1991), myotonic dystrophy (Ranum, L. P. & Day, J. W., 2002), and other neurological disorders (Brouwer, J. R., et al., 2009)), and are associated with proliferative genetic disorders, such as neoplasms (Fujimoto, A., et al., 2020; Bonneville, R. et al., 2017; Hause, R. J. et al., 2016; Kim, T. M., et al., 2013). Monitoring rare microsatellite variation could facilitate de novo detection of any new clonal expansion, from early detection of cancer to clonal hematopoiesis (Jaiswal, S. & Ebert, B. L, 2019), or clonal expansions in the germline (Goriely, A. & Wilkie, 2012).

[0438] Biological sample: Any material, including without limitation, blood, serum, fluid biopsy samples, tissue biopsy samples, and forensic samples, that originates from a biological source.

[0439] Disrupting the microsatellite repeat structure by partial mutagenesis: The same property that creates variable microsatellite length during replication makes it difficult to assay these markers following exponential amplification. The approach described herein is to disrupt the microsatellite repeat structure sufficiently during the processing of templates in a biological sample prior to their exponential amplification, to stabilize their length, and allow detection of length variation in the biological sample with accuracy and sensitivity. The method uses partial mutagenesis of templates or their first copies that can alter the repeat unit, thereby reducing the number of tandem repeats while not changing the original distance between the microsatellite flanks. But if mutagenesis is not partial, but complete or nearly complete, then a new tandem repeat structure as unstable as the original structure can be created. Therefore, disruption of a tandem repeat structure is the criterion for creating a stable replicating molecule. Typically, the degree of disruption is determined for each sequence by the presence of sequence alterations within the tandem repeats that would be expected from the mutagenesis.

[0440] Replicative error during the first round and during exponential amplification: Microsatellite length is not stable under most conditions of replication. It is hypothesized that is due to polymerase slippage, because the changes in length typically come in units of the length of the tandem repeat that make up the microsatellite (Clarke, L. A., et al., 2001, Kunkel, T. A., 1986). Because the error in a read is dependent on the number of rounds of replication, it is useful to refer to the replication error rate as error per round of replication. As gain in length is less common than loss of length, it is also useful to specify the nature of the length error, for example, as a loss of one unit per round. There are two ways to estimate the replication error: assess the number of first round copies of a template of known length that are in error; or model the number of reads that are in error after N rounds of replication. If the latter is after N rounds of exponential amplification, then the proper model is that derived from Luria-Delbruck distributions, as described and performed in the Example 1. The replication error will depend on the nature of the microsatellite as well as on its length. For a given microsatellite length, mononucleotides will have a higher replication error rate than longer repeat units, and for a given repeat unit, replication error will increase as the number of repeat units increase.

[0441] Sequence platform error: The measurement of repeats is further aggravated by the constraints of modern high-throughput sequencing platforms which are known to perform poorly with repeat sequences (Stoler, N. & Nekrutenko, A., 2021; Zavodna, M., et al., 2014; Nakamura, K. et al., 2011). Short-read sequencers (i.e. Illumina MiSeq, NextSeq, NovaSeq), which operate by sequencing-by-synthesis, require an initial amplification step on the sequencer. This amplification results in a cluster of molecules that are expected to contain identical sequences. However, due to replicative error discussed above, clusters generated from templates containing MS have many molecules that are out-of-phase with each other. This results in a high degree of uncertainty in the base calling algorithm during and after the repeat sequence, reflected in the per-base quality scores see in FIG. 6A to FIG. 6F of Example 1. When the base quality is sufficiently degraded by trying to read through a MS, the post-MS flank sequence is either not called or no longer resembles the actual sequence, which makes it impossible to determine the length of the MS in that read (see FIG. 7 of Example 1). Mononucleotide repeats are most affected by this phenomenon, but even dinucleotide repeat reads suffer from reduced sequencing quality scores in the post-MS flanks, particularly as they increase in length. Disruption of the microsatellite eliminates this machine error by reducing replicative error and thus avoiding the problems with clusters getting out of phase.

[0442] Previous methods for measuring microsatellite length: To tackle the problem of measuring microsatellite length, various approaches have been attempted to-date. Multiplex PCR and capillary electrophoresis methods have been described to measure 5-10 microsatellite loci (Bacher, J. W. et al., 2004; Boland, C. R. et al., 1998; Murphy, K. M. et al., 2006). MS lengths have been characterized from gene panels and high throughput sequencing data (Georgiadis, A. et al., 2019; Middha, S. et al., 2017), and statistical methods have been developed to increase accuracy in calling MS lengths from standard NGS data (Fungtammasan, A. et al., 2015; Highnam, G. et al., 2013). Finally, droplet digital PCR has been employed (Silveira, A. B. et al., 2020) to increase accuracy for small numbers of loci. None of these methods have the scale, depth, generality and accuracy needed for routinely monitoring a large set of microsatellite loci.

[0443] Partial mutagenesis: Mutagenesis is defined herein as a process applied to a template whereby copies of the template have a related but altered sequence. As used in the context of mutagenesis to aid in measurement of microsatellite lengths, one uses protocols that result in nucleotide substitutions in subsequent copies of the template, but preserve lengths.

[0444] Such length-preserving protocols can be achieved in either or both of two ways: first, modify the template so that its base pairing functionality is changed; second, copy the template under conditions such that nonstandard nucleotides are incorporated. In the first instance, one may use chemical modification, enzymatic treatment, nonstandard nucleotide substitutions, or combinations thereof. In each instance, the nonstandard nucleotides either have altered base pairing properties in and of themselves, or have altered base pairing properties following chemical or enzymatic treatment. After these steps are executed, copying the treated molecules using polymerases and standard nucleotides produce copies with altered sequences.

[0445] The desired mutagenic protocol useful for treatment of microsatellites is partial mutagenesis. If the mutagenesis is complete it may not destroy the repeat structure which makes replication error prone. With complete mutagenesis, the original repeat unit sequence may change to a new repeat sequence, but the number of repeat units may not change.

[0446] Any mutagenic process can be controlled. For example, the extent of chemical mutagenesis will depend on time, temperature, the concentration of reactants, pH and the like. If one is incorporating nonstandard nucleotides, the ratio of the nonstandard nucleotide to its standard counterpart (for examples, the ratio of methyl-cytosine to cytosine or inosine to adenine) will determine the extent of incorporation or replacement. The degree of mutagenesis achieved over each read can be determined from the substitutions observed in the flanking regions and in the microsatellite repeats themselves.

[0447] If mutagenesis is partial it will have these desirable properties:
[0448] (a) It will induce a “signature” nucleotide substitution in the final copies of the template that can distinguish the mutagenesis from random mutation that can occur by natural processes or polymerase error.
[0449] (b) Typically, when mutagenesis is partial, a variety of mutational patterns are created by the process. When this happens we can refer to “partial random mutagenesis.”

[0450] Partially mutagenized templates: As used herein “partially mutagenized templates” refers to any nucleic acid template that differs from an initial nucleic acid template as a result of partial mutagenesis. Therefore, an initial nucleic acid template that has been subjected to partial mutagenesis is a “partially mutagenized template.” Similarly, if a first copy of the partially mutagenized template is made, that is also referred to herein as a “partially mutagenized template.” Further, if a first copy of an initial nucleic acid template is made during a step of partial mutagenesis, that is also referred to herein as a “partially mutagenized template.” Still further, if a first copy of an initial nucleic acid template is made, and that first copy is then subjected to partial mutagenesis, that is also referred to herein as a “partially mutagenized template.”

[0451] Corresponding standard or nonstandard nucleotide: In the context of incorporating standard and nonstandard nucleotides into a template or a copy of a template, a standard nucleotide's “corresponding” nonstandard nucleotide refers to the nonstandard nucleotide that can be incorporated into a template or copy of a template instead of that standard nucleotide. Conversely, a nonstandard nucleotide's “corresponding” standard nucleotide refers to the standard nucleotide that can be incorporated into a template or copy of a template instead of that nonstandard nucleotide. For example, when incorporating standard and nonstandard nucleotides into a copy of a template by copying a template in the presence of a mixture of standard nucleotides and 5-methylcytosine, the corresponding standard nucleotide of 5-methylcytosine is cytosine because each can be incorporated into a copy of a template instead of the other.

[0452] Measuring length of MS in Sequencing reads: Microsatellites are tandem repeats, and have left and right flank sequences (flanking portions) that delineate them. This is illustrated in FIG. 1. The flank sequences are useful for two purposes:
[0453] (a) They map a read with a microsatellite to its locus;
[0454] (b) They delineate the boundaries of the microsatellite in the read.

[0455] Flank sequences: Flank sequences are also referred to herein as “flanking portions.” There is a flank length sufficient for purpose (a) above. This may be on the order of 12-15 bases when mapping a read to a population of templates enriched for microsatellite loci by panels, or on the order of 20-30 when mapping the locus to the entire genome. It is possible to map the read to its locus using only matches of the left or the right flank. Given that the read has been mapped to a specific locus with one flank, then a shorter length in the other flank may be sufficient for purpose (b), on the order of 3-5 bases to delineate the microsatellite-flank boundary (see FIG. 2). The flank sequences in a read are subjected to mutagenesis along with the microsatellite sequence. Thus, when identifying and mapping the flank sequences, both the reference flank search sequences and the read sequences can be fully converted to aid the mapping and alignment process. Once the read has been assigned to its locus and the boundaries of the microsatellite are identified using the flank sequences (flanking portions), the microsatellite length (MSL) can be determined from the difference in the position of the two flank boundary positions.

[0456] Distributions of Microsatellite Lengths: Over any population of templates, there will be a distribution of microsatellite lengths, the initial microsatellite length distribution, reflecting the replicative history of the cells or organisms from which those templates were drawn. Upon sequencing the reads from copies of the mutagenized templates, one obtains instead a distribution of microsatellite lengths, which, if the reads are selected to have a disrupted microsatellite structure, will accurately reflect that initial distribution.

[0457] In practice, one makes distributions over sets of reads where the reads are partitioned into sets by the locus of their provenance, as identified by flanking sequences. For each such set, one can make further subsets of reads further partitioned by first copies or templates of origin, or both, provided sequenced reads include identifiers, such as varietal tags or partial mutagenesis patterns, to make these assignments. For any distribution over a set of reads, one can apply a consensus rule to get a consensus length. One then can obtain thereby distributions of consensus lengths. For example, from the consensus over first copies, one obtains a distribution of first copy consensus lengths over initial templates. Furthermore, one can take a consensus from the distribution of first copy consensus lengths to obtain a consensus length for each initial template. These are all steps one makes to more accurately assess the initial microsatellite length distribution.

[0458] A consensus rule is a function that takes as input a microsatellite length distribution and returns a single value if possible. Examples of consensus rules include:
[0459] (a) Unanimous rule: L if the distribution has a single length L.
[0460] (b) Plurality rule: L if L is the most common length in the distribution.
[0461] (c) Majority p-rule: L if there is a length L in the distribution with a frequency greater than p where p is >=0.5.

[0462] For data with multiple loci, each locus has a unique microsatellite length distribution. This collection of microsatellite length distributions determines the microsatellite length distribution profile for the sample.

[0463] Individual identifiers or individual tags: Initial templates and/or first copies are tagged in a way such that individual templates can be distinguished, and subsequent copies retain information from the tags. Without limitation, the individual tags, also referred to herein as “individual identifiers”, may be any combination of: (1) randomized nucleotide sequences added to the ends of templates by extension or ligation (i.e., varietal tags); (2) diverse fragment end positions created during extraction from biological specimens, following physical fragmentation, or following treatment with non-specific endonucleases; or (3) a pattern of partial mutation, as introduced into the initial template in a step of partial mutagenesis. As a result of this tagging, two or more copies derived from the same initial template can be so identified.

[0464] Varietal tags: Varietal tags are described in U.S. Pat. No. 9,404,156, the entire contents of which is specifically incorporated herein by reference. As discussed in U.S. Pat. No. 9,404,156, varietal tags comprise nucleotide sequences that are sufficiently unique with respect to one another such that the combination of a varietal tag with a nucleic acid molecule from the input sample (e.g. initial nucleic acid templates) provides an essentially unique tagged nucleic acid molecule that can only with very low probability be replicated by chance from another like molecule (a chance of roughly 1/N where N is the number of available tags). Accordingly, within a pool of tagged nucleic acid molecules, each tagged nucleic acid molecule is likely unique in the pool when a sufficiently large number of distinct tags is used. Without limitation, varietal tags of the invention may be 4, 5, 6, 7, 8, 9, 10, 11, 12, 13, 14, 15 up to 1000 nucleotides long. A person skilled in the art can readily determine the number of distinct tags that should be used for a given sample to ensure that each tagged nucleic acid molecule is likely unique in the pool. Varietal tags may also comprise sample tags. Sample tags are similar to varietal tags except that the same sample tag is attached to each member of a unique sample in order to identify the nucleic acid molecule as a member of that unique sample. Using sample tags, multiple unique samples can be pooled and processed simultaneously according to the methods described herein because the sequence reads of nucleic acids originating from the same unique sample can be identified and deconvoluted. Varietal tags may also comprise universal primer sequences which, in conjunction with a universal primer, may be used to amplify tagged nucleic acid molecules. In an embodiment, the set of tags are sufficiently large, such that tagged nucleic acid molecules differ at more than one nucleotide, and so tagged nucleic acid molecules that differ by a single nucleotide are determined to originate from the same initial template. In an embodiment, the varietal tags lack nucleotides that are susceptible to the step of partial mutagenesis used in the method.

[0465] First copies: Copies of nucleic acid molecules produced directly from a template nucleic acid molecule. First copies may be produced from a template nucleic acid molecule by linear amplification.

[0466] Linear amplification: A method which amplifies a nucleic acid molecule by producing copies only from an original nucleic acid molecule and not from its copies. One method of linear amplification involves a polymerase chain reaction (PCR) in the presence of only a forward primer or only a reverse primer, such that only the original nucleic acid molecule (and not its copies) are used as the template from which additional copies of the nucleic acid molecule are produced.

[0467] Standard nucleotides: In the context of amplification or coyping a nucleic acid templates, standard nucleotides refers to the nucleotides present in a standard polymerase chain reaction (PCR) nucleotide mixture, i.e. deoxyadenosine triphosphate (dATP), deoxycytidine triphosphate (dCTP), deoxyguanosine triphosphate (dGTP), and deoxythymidine triphosphate (dTTP).

[0468] Purification moiety: A purification moiety refers to a chemical moiety which has a specific binding affinity with another molecule and may be used in affinity purification. One example of a purification moiety is biotin, which has a high specific binding affinity to streptavidin.

### Sequence Read Analysis

[0469] Proper read: A proper read pair has a good match (up to one mismatch) to each of the UP1, UP2, and UP3 regions (if used in the protocol) and the proximal flank of the microsatellite in both reads. A proper read always has a proximal flank, but it is possible that the distal flank could not be clearly identified. In those cases, the read does not report a length.

[0470] Qualified: A read pair is considered qualified if both paired-end reads agree on the MSL, or if only one read of the pair reports a length. These MSL are then labeled as on-target if they are the expected length (i.e. 17, 18, or 26), and off-target, otherwise.

[0471] Disruption indices: For qualified reads, the degree to which the microsatellite is disrupted by the mutagenesis is measured in two ways. The first is the MS conversion rate, for example the proportion of C bases converted to T in the MS, for a bisulfite mutagenesis protocol. The second is the maximum repeat length, which is the largest number of tandem repeat units remaining in the microsatellite.

[0472] Disrupted: A read is defined as disrupted if the MS conversion rate is between 0.15 and 0.85 and the maximum repeat length does not exceed a defined threshold. In embodiments, this defined threshold is five. In other embodiments, this threshold is six or seven. A first copy is labeled disrupted if the median disruption parameters over its qualified reads are within the bounds to call a read disrupted.

[0473] Properly-covered: A first copy is called properly-covered if it has a sufficient number of proper reads. The threshold for the number of reads required to define properly-covered depends on the complexity and depth of the library.

[0474] Well-covered: A first-copy is called well-covered if it is properly-covered and has at least three qualified reads.

[0475] Modal length: The modal length of a first copy is defined as the value most commonly seen among all the reads associated with it.

### General

[0476] All combinations of the various elements and embodiments disclosed herein are within the scope of the invention.

[0477] As used herein, all headings are simply for organization and are not intended to limit the disclosure in any manner. The content of any individual section may be equally applicable to all sections. All combinations of the various elements disclosed herein are within the scope of the invention.

[0478] Additional objects, advantages, and novel features of the present invention will become apparent to one ordinarily skilled in the art upon examination of the following examples, which are not intended to be limiting. Additionally, each of the various embodiments and aspects of the present invention as delineated hereinabove and as claimed in the claims section below finds experimental support in the following examples.

[0479] It is appreciated that certain features of the invention, which are, for clarity, described in the context of separate embodiments, may also be provided in combination in a single embodiment. Conversely, various features of the invention, which are, for brevity, described in the context of a single embodiment, may also be provided separately or in any suitable sub-combination or as suitable in any other described embodiment of the invention. Certain features described in the context of various embodiments are not to be considered essential features of those embodiments, unless the embodiment is inoperative without those elements.

[0480] This invention will be better understood by reference to the Examples which follow, but those skilled in the art will readily appreciate that the specific experiments detailed are only illustrative of the invention as described more fully in the claims which follow thereafter.

### EXAMPLES

[0481] In the examples that follow, the problem of accurate measurement of MSLV is solved by using partial mutagenesis to disrupt enough of the repeat structure so that templates containing microsatellites can replicate faithfully, yet not so much that the flanking regions cannot be reliably identified. Compared to untreated templates, the methods described herein achieve three orders of magnitude reduction in the rate of error per round of replication. By requiring two independent first copies of an initial template, the methods described herein reach error rates below one in a million.

### Example 1—Accurate Measurement of Microsatellite Length Following Disruptive Mutation on Synthetic Templates

[0482] The following example demonstrates the microsatellite length determination of synthetic templates. It illustrates many of the principles of the method described herein: the high level of sequence error for unmutated microsatellites, especially mononucleotide tracts; high levels of platform sequence error over unmutated mononucleotide tracts; partial bisulfite mutagenesis; estimating replicative error; the relationship between accuracy of length measurement and the degree of microsatellite disruption; labeling initial templates and first copies for later identification; improvement in accuracy by aggregating length measurements over many reads, first copies and initial templates; and how to compute error over small numbers of reads distributed over templates and first copies.

### Example 1a: Template Design

[0483] For the testing and development of this method, three synthetic templates containing microsatellite (MS) tracts were used. The MS sequences are: a 17 base-pair mononucleotide A repeat called M-17 (A), an 18 base-pair mononucleotide C repeat called M-18 (C), and a 26 base-pair dinucleotide CA repeat called D-26 (CA). The templates were ordered from Integrated DNA Technologies (IDT). The full sequences of the synthetic templates, oligonucleotide adaptors, and primers are given in Table 1. As shown in FIG. 3, the structure of synthetic templates used for the partial mutagenesis protocol, M-18 (C) and D-26 (CA), is as follows: a 5′ primer binding site without cytosine (UP1), a 15-mer varietal tag sequence (VT1) with random nucleotides represented as “NNN . . . ”, a 5′ flanking sequence, a C or CA microsatellite, another 3′ flanking sequence, another 15-mer varietal tag (VT2) with random nucleotides represented as “DDD . . . ”, and finally a 3′ binding site (UP2) without cytosine. Templates containing mononucleotide A, denoted as M-17 (A), which did not undergo mutagenesis were also examined. These had a very similar design to the C microsatellite templates detailed in Table 1. The notation M-18 (C+) and D-26 (CA+) is used to denote the templates and libraries after mutagenesis, and M-18 (C−), D-26 (CA−), and M-17 (A−) are used to refer to libraries without mutagenesis.

TABLE 1
Sequence information of the templates and the oligonucleotides
The sequences for the 3 template sequences: M-18 (C), D-26 (CA), and M-17 (A) are
listed. N's indicate random nucleotides; D's indicate random nucleotides excluding
C. Oligo (1) and primer sequences UP1 and UP3 are also listed for the two protocols used.
A. For the templates M-18 (C) and D-26 (CA)

| Template | Sequence (5′ to 3′) |
|---|---|
| M-18 (C) | AAGTTGGATGGTGGTGGTNNNNNNNNNNNNNNNCACGACATTCCAGGGAACGTTGCT |
| | TCACATATGGATTTCGTAACCCCCCCCCCCCCCCCCCGAAAGTACCTCCTATCGTCC |
| | GTATDDDDDDDDDDDDDDDGGAGAGTGTGGAGGGTTG (SEQ ID NO: 3781) |
| D-26 (CA) | AAGTTGGATGGTGGTGGTNNNNNNNNNNNNNNNAGCCTAATACTACAGTGCCGAGCG |
| | CACGCGTGCCTGCTGACATTGTCACACACACACACACACACACACACATTTCCTGGG |
| | CTTGTATTTTCCAAADDDDDDDDDDDDDDDGGAGAGTGTGGAGGGTTG (SEQ ID |
| | NO: 3782) |
| Oligonucleotide | Sequence (5′ to 3′) |
| oligo (1) | /5Biosg/GTGGTATCAACGCAGAGTNNNNNNNNNNNNNNNNNNCAACCCTCCACAC |
| | TCTCC (SEQ ID NO: 3783) |
| UP1 | AAGTTGGATGGTGGTGGT (SEQ ID NO: 3784) |
| UP3 | GTGGTATCAACGCAGAGT (SEQ ID NO: 3785) |

B. For the template M-17 (A)

| Template | Sequence (5′ to 3′) |
|---|---|
| M-17 (A) | CAAGCCTCCAAGCTGTGCNNNNNNNNNNNNNNNGTACCGAACTGTACGCACGACATT |
| | CCAGGGAACGTTGCTTCACATATGGATTTCGTAACTAAAAAAAAAAAAAAAAACGAA |
| | AGTACCTCCTATCGTCGTCGACAAANNNNNNNNNNNNNNNNNNACTCTGCGTTGATA |
| | CCAC (SEQ ID NO: 3786) |
| Oligonucleotide | Sequence (5′ to 3′) |
| oligo (1) | /5Biosg/AAAGTTGCATGGTGCTGGTNNNNNNNNNNNNNNNNNNGTGGTATCAACG |
| | CAGAGT (SEQ ID NO: 3787) |
| UP1 | CAAGCCTCCAAGCTGTGC (SEQ ID NO: 3788) |
| UP3 | AAAGTTGCATGGTGCTGGT (SEQ ID NO: 3789) |

### Example 1B: Protocol for Partial Mutagenesis, Library Preparation, and Sequencing

[0484] An operational protocol for partial mutagenesis of microsatellite templates is described here and in FIG. 3. In step 1 of the mutagenesis protocol, 80 ng of each of the two templates containing C, M-18 (C) and D-26 (CA), was partially bisulfite converted (or not) by EZ DNA Methylation-Direct Kit (Zymo Research). Incubation time and temperature for bisulfite conversion were chosen to approach an ideal bisulfite conversion rate of close to 50%. In this protocol, DNA was incubated at 55° C. for 40-50 min. In fact, this protocol achieved 77% and 66% conversion for the M-18 (C+) tract and the D-26 (CA+) tract, respectively.

[0485] After conversion, about 6×10⁴ original templates underwent 9 cycles of linear amplification (steps 2 and 3) using a biotinylated oligo. This produced first round copies (first copies, for short) with a structure that had a 5′ biotinylated UP3 and a VT3 represented as “NNN . . . ” in the Table 1 and in gray scale in FIG. 3. Double-stranded DNA fragments were obtained in another round of linear amplification by using UP1 (step 4). In step 5 extra free oligo was removed by Thermolabile Exonuclease I (NEB). After adding 50 ng of carrier DNA (poly (A), Sigma-Aldrich), biotinylated DNA fragments were purified by streptavidin beads (NEB). In step 6, 18 cycles of the exponential PCR were carried out using UP1 and UP3 to generate enough material to prepare the DNA libraries for sequencing. Standard steps for library preparation (end polishing, A-tailing, adapter ligation) were utilized to complete the sequencing library preparation (step 7). All libraries were prepared with variable length library barcodes (Shi, J. et al., 2015), and then pooled. The pooled libraries were sequenced as 2×150 bp paired-end runs on an Illumina MiSeq™ (step 8).

[0486] In steps 3 and 4 (linear amplification of first copies) NEBNext® Q5U® Master Mix was used. This master mix contains modified Q5® High Fidelity DNA Polymerase, optimized for amplification of uracil-containing templates. In step 6 Phusion Flash High-Fidelity PCR Master Mix (Thermo Fisher Scientific) was used for 18 cycles of PCR. This master mix contains Phusion Flash II DNA Polymerase which has high-fidelity and is excellent for multiplex PCR. In step 7, for library preparation, NEBNext® Ultra™ II Q5® Master Mix (NEB) was used. This master mix contains Q5® High Fidelity DNA Polymerase, optimized for amplification of NGS libraries.

[0487] The parallel protocol without bisulfite treatment, used for the unmutated C templates, M-18 (C) and D-26 (CA) and M-17 (A), had the following differences: the number of original templates was about 3×10⁴, and in step 6, 14 or 15 cycles of PCR were employed.

### Example 1C: Sequence Processing and Tabulation

[0488] All read pairs were first evaluated for having the proper structure. A proper read pair has a good match (up to one mismatch) to each of the UP1, UP2, and UP3 regions and the proximal flank of the microsatellite in both reads. From a proper read pair, it is possible to extract the three varietal tags which identify the template (VT1, VT2) and first copy (VT3). From each read of the pair, a search was also conducted for a good match to the distal flank sequence (up to one mismatch), and if the distal flank was found, a microsatellite length (MSL) was reported based on the distance in base pairs (bp) between the flanks within the read. A proper read always has a proximal flank, but it is possible that the distal flank could not be clearly identified. In those cases, the read did not report a length. A read pair is considered qualified if both paired-end reads agree on the MSL, or if only one read of the pair reports a length. These MSL are then labeled as on-target if they are the expected length (i.e. 17, 18, or 26), and off-target, otherwise.

[0489] For qualified reads, the degree to which the microsatellite is disrupted by the mutagenesis is measured in two ways (disruption indices). The first is the MS conversion rate or the proportion of C bases converted to T in the MS. The second is the maximum repeat length, which is the largest number of tandem repeat units remaining in the microsatellite. A read is defined as disrupted if the MS conversion rate is between 0.15 and 0.85 and the maximum repeat length does not exceed five. See Table 2 for the expected yield of microsatellite disruption as a function of the average bisulfite conversion rate, as determined by simulation. The observed levels of disruption follow closely the expectations from simulations.

TABLE 2
Disruption yields as a function of mutation rate
For the M-18 (C+) and D-26 (CA+) templates, the proportion of reads passing each
of the two disruption parameter thresholds is modeled as a function of overall mutation rate.
The reads that pass the rate cutoff are the reads with between 15% to 85% of C's mutated,
and the reads that pass the repeat length cutoff have 5 or fewer units of the repeat intact.
Highlighted in bold are the mutation rate bins that most closely match the observed data.

| M-18 (C+) | | | | D-26 (CA+) | | | |
|---|---|---|---|---|---|---|---|
| | pass | pass | | | pass | pass | |
| | conversion | repeat | | | conversion | repeat | |
| | rate | length | | | rate | length | |
| mutation | thresholds | threshold | | mutation | thresholds | threshold | |
| rate | (15-85%) | (<=5) | pass both | rate | (15-85%) | (<=5) | pass both |
| 0.05 | 0.05936 | 0.00622 | 0.00622 | 0.05 | 0.1356 | 0.03421 | 0.03421 |
| 0.1 | 0.26615 | 0.04262 | 0.04262 | 0.1 | 0.38117 | 0.12517 | 0.12517 |
| 0.15 | 0.51932 | 0.12061 | 0.12061 | 0.15 | 0.60058 | 0.24773 | 0.24773 |
| 0.2 | 0.72837 | 0.2326 | 0.2326 | 0.2 | 0.76585 | 0.38283 | 0.38283 |
| 0.25 | 0.86473 | 0.36285 | 0.36285 | 0.25 | 0.8742 | 0.51469 | 0.51469 |
| 0.3 | 0.93828 | 0.49772 | 0.49772 | 0.3 | 0.93599 | 0.63861 | 0.63861 |
| 0.35 | 0.97632 | 0.61845 | 0.61845 | 0.35 | 0.97089 | 0.73097 | 0.73097 |
| 0.4 | 0.99163 | 0.70939 | 0.70939 | 0.4 | 0.9873 | 0.80323 | 0.80323 |
| 0.45 | 0.99737 | 0.77244 | 0.77244 | 0.45 | 0.99455 | 0.84632 | 0.84632 |
| 0.5 | 0.99879 | 0.79238 | 0.79238 | 0.5 | 0.99659 | 0.86161 | 0.86161 |
| 0.55 | 0.99728 | 0.76924 | 0.76924 | 0.55 | 0.99435 | 0.848 | 0.848 |
| 0.6 | 0.99224 | 0.71046 | 0.71046 | 0.6 | 0.98754 | 0.80341 | 0.80341 |
| 0.65 | 0.97657 | 0.61781 | 0.61781 | 0.65 | 0.9702 | 0.73203 | 0.73203 |
| 0.7 | 0.93949 | 0.49742 | 0.49742 | 0.7 | 0.93576 | 0.63515 | 0.63515 |
| 0.75 | 0.86632 | 0.36552 | 0.36552 | 0.75 | 0.87283 | 0.51461 | 0.51461 |
| 0.8 | 0.72752 | 0.23116 | 0.23116 | 0.8 | 0.76624 | 0.38251 | 0.38251 |
| 0.85 | 0.51784 | 0.11924 | 0.11924 | 0.85 | 0.60403 | 0.24738 | 0.24738 |
| 0.9 | 0.26888 | 0.04391 | 0.04391 | 0.9 | 0.38108 | 0.12797 | 0.12797 |
| 0.95 | 0.05703 | 0.00595 | 0.00595 | 0.95 | 0.1354 | 0.03507 | 0.03507 |

[0490] A set of 5 tables were created from the proper reads for each of the 5 libraries (3 templates and 2 protocols): M-17 (A−), M-18 (C−), D-26 (CA−), M-18 (C+), D-26 (CA+), which are called the READ TABLE. The READ TABLE records the varietal tag information for the read, the MSL if the read is qualified (−1, otherwise), and its two disruption indices.

[0491] From the READ TABLES, the FIRST COPY TABLES were then created. A first copy is marked by its template tag-pair (VT1, VT2) and its first copy tag (VT3). A first copy is called properly-covered if it has a sufficient number of proper reads. The threshold for the number of reads required to define properly-covered depends on the complexity and depth of the library and was 10, 10, 20, 50, and 100 for M-17 (A−), M-18 (C−), D-26 (CA−), M-18 (C+), D-26 (CA+), respectively. The choice for these cutoffs, given the actual distribution of available reads, are shown in FIG. 4. A first-copy is called well-covered if it is properly-covered and has at least three qualified reads. For each well-covered first copy, the MSL was counted over all qualified reads to determine the modal length, which is the most common length reported by all reads associated with that first copy. A first copy is labeled disrupted if the median disruption parameters over its qualified reads are within the bounds to call a read disrupted.

[0492] For each first copy, the number of proper reads, the number of qualified reads, the modal length, and the number of qualified reads that report the modal length were all tabulated. For each first copy, the median disruption indices of its qualified reads were also recorded, where applicable. A WELL-COVERED FIRST COPY TABLE was then created by restricting to rows with a sufficient number of proper and qualified reads. This filtering step eliminated VT combinations with low read coverage that result from single-base errors in the varietal tag sequences.

[0493] From the WELL-COVERED FIRST COPY TABLE, a TEMPLATE TABLE was generated. A template is any template tag-pair (VT1, VT2) with at least one well-covered first copy. For each template, the number of qualified reads, the number of well-covered first copies, and the median disruption indices from its first copies were all counted. If those median disruption indices fall within the criteria defined for a disrupted read, the template is called disrupted. The modal lengths of the well-covered first copies for each template was also recorded. A template is called well-covered if it has at least three well-covered first copies. Well-covered templates are flagged as synthetic variants if three or more first copies unanimously agree on an MSL length different from expected.

### Example 1D: Modeling Error

[0494] Two methods are used for modeling error. The first uses the method of moments; the second uses Luria-Delbruck Diffusions, or LDD (Luria, S. E. & Delbrück, 1943). The first method utilizes the varietal tags to identify reads with the first copies and the template from which they arose. Even if all templates are of the same initial length, the first copies may have different lengths due to replication error. Moreover, each first copy has its own probability of error due to random events occurring during exponential growth. The N-th moment for length L in the read data is defined as the mean probability that N reads from each chosen first copy are unanimous for length L. Thus read error is nearly identical to the 1-st moment for any given L.

[0495] In the second method, per-round PCR error rates are estimated with LDD. In a simple LDD, each round of an exponential amplification is modeled such that each single stranded nucleic acid of length L replicates with efficiency e, and its copy then retains its length, or decreases or increases its length by one unit according to two errors rate parameters: α and β. For simplicity it is assumed that α and β are not functions of strand or L, and the length increases or decreases only by the length of a single tandem repeat unit. All copies are retained in each round, but to simulate the protocol, the original template is not retained. After seeding with a single original template and R rounds of replication, a simulated distribution of MS lengths is obtained. α and β are estimated for the templates by simulating LDD distributions over a grid of parameter values and identifying the best match to the observed read error rate (see FIG. 5 for algorithm details).

### Example 1E: Experimental Design

[0496] The performance of the partial mutagenesis protocol for microsatellites are evaluated by examining 5 sequencing libraries generated from 3 synthetic templates using 2 protocols.

[0497] As shown in the top of FIG. 3, the templates contain mononucleotide A, mononucleotide C, and dinucleotide CA microsatellites (MS), flanked on either side by common sequence (black). 5′ and 3′ to the common sequence are randomly generated varietal tag sequences (VT1 and VT2) that uniquely label each template molecule. Flanking the varietal tags are universal primer sequences (UP1 and UP2′) designed without C nucleotides if needed to resist bisulfite mutagenesis.

[0498] FIG. 3 shows a protocol for bisulfite mutagenesis, followed by library preparation and sequencing. The protocol is discussed in more detail in the Example 1B. Briefly, the templates were either bisulfite treated or not, in step 1. A biotinylated primer complementary to the 3′ universal primer UP2′, with its own unique varietal tag (VT3, gray) and a universal primer sequence (UP3) is added in step 2. Multiple first copies are generated (step 3), each with the same VT1-VT2 and a unique first copy tag VT3. The first copies are made double-stranded (step 4), purified by streptavidin chromatography (step 5), and amplified by PCR (step 6). Finally, the PCR products are made into libraries with specific barcodes, pooled and sequenced to high depth (steps 7-8).

[0499] The 5 sequencing libraries are named M-17 (A−), M-18 (C−), D-26 (CA−), M-18 (C+), D-26 (CA+), corresponding to M (mono-) or D (di-nucleotide), their microsatellite length, the sequence of the microsatellite repeat unit, and whether mutagenesis was applied (+/−). These are abbreviated to A−, C−, CA−, C+ and CA+, respectively. A template is disrupted if the mutagenesis resulted in sufficient conversion to corrupt the repeat structure (see Materials and Methods). In the analyses below, when the data for the mutated libraries is restricted to only the disrupted templates, these datasets are referred to as M-18 (C++) or C++, and D-26 (CA++) or CA++. The proportion of disrupted reads in the C++ and CA++ libraries is 29% and 73%, respectively, which falls close to the expected proportion, given the conversion rates (see Table 2).

[0500] Below the properties of the microsatellite lengths observed in the data for A−, C−, CA−, C++, and CA++, are described at three levels of organization: (1) reads, (2) first copies, and (3) templates. At the top level are the templates which refer to the original synthesized molecules. These are uniquely identified by their VT1-VT2 tag-pair. The next level is the first copies which are generated during the first round of linear amplification (FIG. 3, step 2). First copies are identified by the unique triplet: the VT1-VT2 pair from their initial template, and the unique VT3 added to the molecule during linear amplification. At the bottom level are the reads of the sequencing library. For those reads with the correct structure, its three varietal tags and, when possible, the length of the microsatellite are determined. For details on data processing of reads, first copies and templates and for definitions of the terms used below, see Example 1C.

### Example 1F: Estimates of MSL Error Rates from Data

### Reads

[0501] Within a sequencing read, measuring the MSL depends on identifying the expected proximal and distal flank sequences and measuring their distance in the read. When parsing the unmutated mononucleotide reads, in particular the M-18 (C−) library, it was discovered that the base quality of the read decays considerably after reading through the microsatellite sequence (FIG. 6A to FIG. 6F). In many cases, this decay of base quality is so bad that the distal flank sequence could not be identified in the read. In the M-18 (C−) dataset, only 46% of proper reads are qualified, and of those 94% failed to report a length from the C-repeat read. In contrast, for the M-17 (A−) 95% of proper reads are qualified, and for the remaining sets, 99% of reads are qualified (FIG. 7).

[0502] In FIG. 8, panels A-E, the microsatellite length determinations per read are shown as a histogram for each of the five libraries. In the histogram, qualified reads that match the expected length are shown in darker grey (on-target), while those reporting a different length are shown in lighter grey (off-target). In general, off-target lengths tend to be shorter rather than longer. Read counts for each MS length and library are shown in Table 3, part A.

TABLE 3
MS length distributions in reads and first copies
For each of the five libraries, this table shows the number of reads and number of first copies that show each possible
microsatellite length, from <=−5 to >=+5 from the expected length. For the three most stable libraries, where it was possible
to identify and remove synthetic variants, the resulting counts after removing synthetic variants are shown.

| | | | MSLV deviation from expected length | | | | | | | | | | |
|---|---|---|---|---|---|---|---|---|---|---|---|---|---|
| A. READS | | | <=−5 | −4 | −3 | −2 | −1 | 0 | +1 | +2 | +3 | +4 | >=+5 |
| M-17 (A−) | unmutated | all | 1540 | 2382 | 15687 | 129032 | 662810 | 1318654 | 496859 | 114349 | 19831 | 3342 | 5390 |
| M-18 (C−) | unmutated | all | 4913 | 2511 | 10068 | 31175 | 56529 | 44531 | 9785 | 1360 | 229 | 51 | 200 |
| M-18 (C++) | disrupted | all | 1072 | 1 | 5 | 14 | 8451 | 1641719 | 60 | 2 | 0 | 0 | 0 |
| D-26 (CA−) | unmutated | all | 8957 | 37395 | 2357 | 339586 | 14455 | 2120035 | 5291 | 18719 | 18 | 702 | 121 |
| D-26 (CA++) | disrupted | all | 8395 | 206 | 848 | 2544 | 51425 | 4413601 | 14353 | 244 | 1 | 10 | 3 |
| M-18 (C++) | disrupted | wc - synth | 2 | 1 | 5 | 12 | 50 | 1612051 | 54 | 2 | 0 | 0 | 0 |
| D-26 (CA−) | unmutated | wc - synth | 3777 | 32367 | 413 | 303560 | 1321 | 1910332 | 450 | 16818 | 0 | 589 | 115 |
| D-26 (CA++) | disrupted | wc - synth | 61 | 196 | 2 | 2453 | 2076 | 4312537 | 405 | 236 | 0 | 10 | 3 |

| | | | MSLV deviation from expected length | | | | | | | | | | |
|---|---|---|---|---|---|---|---|---|---|---|---|---|---|
| B. FIRST COPIES | | | <=−5 | −4 | −3 | −2 | −1 | 0 | +1 | +2 | +3 | +4 | >=+5 |
| M-17 (A−) | unmutated | all | 96 | 58 | 180 | 2250 | 50762 | 164225 | 20588 | 1515 | 112 | 13 | 5 |
| M-18 (C−) | unmutated | all | 294 | 81 | 383 | 7171 | 13146 | 6717 | 428 | 11 | 0 | 0 | 4 |
| M-18 (C++) | disrupted | all | 7 | 0 | 0 | 0 | 58 | 11644 | 0 | 0 | 0 | 0 | 0 |
| D-26 (CA−) | unmutated | all | 86 | 82 | 23 | 1211 | 275 | 44142 | 95 | 36 | 0 | 2 | 1 |
| D-26 (CA++) | disrupted | all | 13 | 0 | 2 | 0 | 61 | 5852 | 18 | 0 | 0 | 0 | 0 |
| M-18 (C++) | disrupted | wc - synth | 0 | 0 | 0 | 0 | 0 | 11415 | 0 | 0 | 0 | 0 | 0 |
| D-26 (CA−) | unmutated | wc - synth | 6 | 54 | 5 | 1047 | 25 | 39557 | 8 | 32 | 0 | 1 | 1 |
| D-26 (CA++) | disrupted | wc - synth | 0 | 0 | 0 | 0 | 0 | 5680 | 0 | 0 | 0 | 0 | 0 |

[0503] For the M-17 (A−) tract, only 47% of the reads report the expected length of 17 bp. For the M-18 (C−) tract, the results are even worse: 28% of reads report the expected length. In contrast, the M-18 (C++) disrupted templates have 99% of reads on-target. For the D-26 (CA−) unmutated library, 83% of reads report the on-target length. The most frequently reported variants occur at 2 bp increments, equivalent to the size of the repeat unit. In contrast, the disrupted D-26 (CA++) templates have a high on-target rate with 98% reporting a length of 26. Unlike the unmutated D-26 (CA−), the off-target reads in D-26 (CA+) are almost entirely 1 bp off, reporting a length of 25 or 27.

### First Copies

[0504] Accuracy can, in principle, be improved by taking a consensus of lengths from reads over first copies. The modal length of a first copy is defined as the value most commonly seen among all the reads associated with it. The distributions of modal lengths are displayed in FIG. 8, in panels F-J, and reported as counts in Table 3, part B. For the M-17 (A−) library, there is a slight improvement in the proportion of MS lengths that are on-target, from 47% when counting reads to 68% when counting the first copy consensus. For the M-18 (C−) library, there is a decline in lengths that are on-target from 28% to 24%. MS length estimates from the D-26 (CA−) unmutated library improve significantly when based on first copies, with 96% on-target, compared to 83% for reads alone. Unexpectedly, the lengths based on disrupted MS have nearly identical on-target rates, about 98% for D-26 (CA++) and 99% for M-18 (C++), whether using reads or first copy consensus. It is suspected that synthetic variant templates are the cause.

[0505] The proportion of synthetic variants, off-target length templates created during the synthesis of the original material, would not exceed the proportion of off-target first copies observed in the best data sets. The proportions in the disrupted data are: 2% for the D-26 (CA++) and 1% for the M-18 (C++). For the unmutated mononucleotide M-17 (A−) and M-18 (C−), the off-target rates are so high that they dwarf any potential improvement from removing these synthetic variant templates. However, identifying and removing the synthetic variant templates could dramatically improve the estimations of off-target rates of M-18 (C++), D-26 (CA++), and D-26 (CA−). To resolve this issue, data aggregated over the initial templates for these three libraries is analyzed.

### Templates

[0506] For each initial template, the modal lengths over all of its first copies are tabulated. This information is condensed by counting the number of first copies on-target (x) and the number of first copies that are off-target (y). FIG. 9 shows a scatter plot summarizing the distribution of (x, y) over all templates for each of the three libraries: M-18 (C++), D-26 (CA−), and D-26 (CA++). The size of the dot and darkness of shading reflect the proportion of templates with those values. For templates with no on-target first copies, the population is split between those whose first copies are unanimous for an off-target length (circles with x's through them, column U) and those whose first copies show multiple off-target lengths (column M).

[0507] Table 4, below, presents the data underlying FIG. 9, for the libraries M-18 (C++), D-26 (CA−), and D-26 (CA++). Each template is tabulated by the number of well-covered first copies on-target (equal to 18 or 26) and the number of well-covered first copies off-target. For the disrupted libraries, templates have either all first copies on-target or all first copies off-target. For the D-26 (CA−), many templates are mixed with both on-target and off-target first copies.

TABLE 4
On-target and off-target rates of first copies, per template. Companion to FIG. 9.
part 1

| D-26 (CA−) | | well-covered first copies ≠ 26 | | | | | | | | | | | | | | | | | |
|---|---|---|---|---|---|---|---|---|---|---|---|---|---|---|---|---|---|---|---|
| unmutated | | 0 | 1 | 2 | 3 | 4 | 5 | 6 | 7 | 8 | 9 | 10 | 11 | 12 | 13 | 14 | 15 | 16 | 17 |
| well-covered | 0 | 0 | 68 | 22 | 21 | 24 | 20 | 14 | 12 | 3 | 1 | 0 | 0 | 0 | 0 | 0 | 0 | 0 | 0 |
| first | 1 | 1569 | 108 | 6 | 1 | 0 | 0 | 0 | 0 | 0 | 0 | 0 | 0 | 0 | 0 | 0 | 0 | 0 | 0 |
| copies = 26 | 2 | 1454 | 133 | 17 | 1 | 0 | 0 | 0 | 0 | 0 | 0 | 0 | 0 | 0 | 0 | 0 | 0 | 0 | 0 |
| | 3 | 1703 | 163 | 17 | 2 | 1 | 0 | 0 | 0 | 0 | 0 | 0 | 0 | 0 | 0 | 0 | 0 | 0 | 0 |
| | 4 | 1772 | 208 | 11 | 1 | 0 | 0 | 0 | 0 | 0 | 0 | 0 | 0 | 0 | 0 | 0 | 0 | 0 | 0 |
| | 5 | 1519 | 187 | 19 | 1 | 0 | 0 | 0 | 0 | 0 | 0 | 0 | 0 | 0 | 0 | 0 | 0 | 0 | 0 |
| | 6 | 1056 | 143 | 12 | 1 | 0 | 0 | 0 | 0 | 0 | 0 | 0 | 0 | 0 | 0 | 0 | 0 | 0 | 0 |
| | 7 | 674 | 55 | 4 | 0 | 0 | 0 | 0 | 0 | 0 | 0 | 0 | 0 | 0 | 0 | 0 | 0 | 0 | 0 |
| | 8 | 319 | 23 | 3 | 0 | 0 | 0 | 0 | 0 | 0 | 0 | 0 | 0 | 0 | 0 | 0 | 0 | 0 | 0 |
| | 9 | 127 | 15 | 0 | 0 | 0 | 0 | 0 | 0 | 0 | 0 | 0 | 0 | 0 | 0 | 0 | 0 | 0 | 0 |
| | 10 | 43 | 1 | 0 | 0 | 0 | 0 | 0 | 0 | 0 | 0 | 0 | 0 | 0 | 0 | 0 | 0 | 0 | 0 |
| | 11 | 9 | 0 | 0 | 0 | 0 | 0 | 0 | 0 | 0 | 0 | 0 | 0 | 0 | 0 | 0 | 0 | 0 | 0 |
| | 12 | 1 | 0 | 0 | 10 | 0 | 0 | 0 | 0 | 0 | 0 | 0 | 0 | 0 | 0 | 0 | 0 | 0 | 0 |
| | 13 | 0 | 0 | 0 | 0 | 0 | 0 | 0 | 0 | 0 | 0 | 0 | 0 | 0 | 0 | 0 | 0 | 0 | 0 |
| | 14 | 0 | 0 | 0 | 0 | 0 | 0 | 0 | 0 | 0 | 0 | 0 | 0 | 0 | 0 | 0 | 0 | 0 | 0 |
| | 15 | 0 | 0 | 0 | 0 | 0 | 0 | 0 | 0 | 0 | 0 | 0 | 0 | 0 | 0 | 0 | 0 | 0 | 0 |
| | 16 | 0 | 0 | 0 | 0 | 0 | 0 | 0 | 0 | 0 | 0 | 0 | 0 | 0 | 0 | 0 | 0 | 0 | 0 |
| | 17 | 0 | 0 | 0 | 0 | 0 | 0 | 0 | 0 | 0 | 0 | 0 | 0 | 0 | 0 | 0 | 0 | 0 | 0 |

| part 2 | |
|---|---|
| D-26 (CA++) | well-covered first copies ≠ 26 |

| disrupted | | 0 | 1 | 2 | 3 | 4 | 5 | 6 | 7 | 8 | 9 | 10 | 11 | 12 | 13 | 14 | 15 | 16 | 17 |
|---|---|---|---|---|---|---|---|---|---|---|---|---|---|---|---|---|---|---|---|
| well-covered | 0 | 0 | 0 | 3 | 2 | 0 | 3 | 2 | 1 | 1 | 2 | 0 | 2 | 0 | 0 | 0 | 0 | 0 | 0 |
| first | 1 | 86 | 0 | 0 | 0 | 0 | 0 | 0 | 0 | 0 | 0 | 0 | 0 | 0 | 0 | 0 | 0 | 0 | 0 |
| copies = 26 | 2 | 43 | 0 | 0 | 0 | 0 | 0 | 0 | 0 | 0 | 0 | 0 | 0 | 0 | 0 | 0 | 0 | 0 | 0 |
| | 3 | 41 | 0 | 0 | 0 | 0 | 0 | 0 | 0 | 0 | 0 | 0 | 0 | 0 | 0 | 0 | 0 | 0 | 0 |
| | 4 | 40 | 0 | 0 | 0 | 0 | 0 | 0 | 0 | 0 | 0 | 0 | 0 | 0 | 0 | 0 | 0 | 0 | 0 |
| | 5 | 51 | 0 | 0 | 0 | 0 | 0 | 0 | 0 | 0 | 0 | 0 | 0 | 0 | 0 | 0 | 0 | 0 | 0 |
| | 6 | 61 | 0 | 0 | 0 | 0 | 0 | 0 | 0 | 0 | 0 | 0 | 0 | 0 | 0 | 0 | 0 | 0 | 0 |
| | 7 | 88 | 0 | 0 | 0 | 0 | 0 | 0 | 0 | 0 | 0 | 0 | 0 | 0 | 0 | 0 | 0 | 0 | 0 |
| | 8 | 109 | 0 | 0 | 0 | 0 | 0 | 0 | 0 | 0 | 0 | 0 | 0 | 0 | 0 | 0 | 0 | 0 | 0 |
| | 9 | 104 | 0 | 0 | 0 | 0 | 0 | 0 | 0 | 0 | 0 | 0 | 0 | 0 | 0 | 0 | 0 | 0 | 0 |
| | 10 | 88 | 0 | 0 | 0 | 0 | 0 | 0 | 0 | 0 | 0 | 0 | 0 | 0 | 0 | 0 | 0 | 0 | 0 |
| | 11 | 62 | 0 | 0 | 0 | 0 | 0 | 0 | 0 | 0 | 0 | 0 | 0 | 0 | 0 | 0 | 0 | 0 | 0 |
| | 12 | 35 | 0 | 0 | 0 | 0 | 0 | 0 | 0 | 0 | 0 | 0 | 0 | 0 | 0 | 0 | 0 | 0 | 0 |
| | 13 | 1 | 6 | 0 | 0 | 0 | 0 | 0 | 0 | 0 | 0 | 0 | 0 | 0 | 0 | 0 | 0 | 0 | 0 |
| | 14 | 6 | 0 | 0 | 0 | 0 | 0 | 0 | 0 | 0 | 0 | 0 | 0 | 0 | 0 | 0 | 0 | 0 | 0 |
| | 15 | 3 | 0 | 0 | 0 | 0 | 0 | 0 | 0 | 0 | 0 | 0 | 0 | 0 | 0 | 0 | 0 | 0 | 0 |
| | 16 | 1 | 0 | 0 | 0 | 0 | 0 | 0 | 0 | 0 | 0 | 0 | 0 | 0 | 0 | 0 | 0 | 0 | 0 |
| | 17 | 1 | 0 | 0 | 0 | 0 | 0 | 0 | 0 | 0 | 0 | 0 | 0 | 0 | 0 | 0 | 0 | 0 | 0 |

| part 3 | |
|---|---|
| M-18 (C++) | well-covered first copies ≠ 18 |

| disrupted | | 0 | 1 | 2 | 3 | 4 | 5 | 6 | 7 | 8 | 9 | 10 | 11 | 12 | 13 | 14 | 15 | 16 | 17 |
|---|---|---|---|---|---|---|---|---|---|---|---|---|---|---|---|---|---|---|---|
| well-covered | 0 | 0 | 0 | 0 | 0 | 0 | 1 | 0 | 1 | 1 | 1 | 0 | 1 | 1 | 1 | 0 | 0 | 0 | 0 |
| first | 1 | 99 | 0 | 0 | 0 | 0 | 0 | 0 | 0 | 0 | 0 | 0 | 0 | 0 | 0 | 0 | 0 | 0 | 0 |
| copies = 26 | 2 | 65 | 0 | 0 | 0 | 0 | 0 | 0 | 0 | 0 | 0 | 0 | 0 | 0 | 0 | 0 | 0 | 0 | 0 |
| | 3 | 38 | 0 | 0 | 0 | 0 | 0 | 0 | 0 | 0 | 0 | 0 | 0 | 0 | 0 | 0 | 0 | 0 | 0 |
| | 4 | 62 | 0 | 0 | 0 | 0 | 0 | 0 | 0 | 0 | 0 | 0 | 0 | 0 | 0 | 0 | 0 | 0 | 0 |
| | 5 | 76 | 0 | 0 | 0 | 0 | 0 | 0 | 0 | 0 | 0 | 0 | 0 | 0 | 0 | 0 | 0 | 0 | 0 |
| | 6 | 104 | 0 | 0 | 0 | 0 | 0 | 0 | 0 | 0 | 0 | 0 | 0 | 0 | 0 | 0 | 0 | 0 | 0 |
| | 7 | 148 | 0 | 0 | 0 | 0 | 0 | 0 | 0 | 0 | 0 | 0 | 0 | 0 | 0 | 0 | 0 | 0 | 0 |
| | 8 | 177 | 0 | 0 | 0 | 0 | 0 | 0 | 0 | 0 | 0 | 0 | 0 | 0 | 0 | 0 | 0 | 0 | 0 |
| | 9 | 188 | 0 | 0 | 0 | 0 | 0 | 0 | 0 | 0 | 0 | 0 | 0 | 0 | 0 | 0 | 0 | 0 | 0 |
| | 10 | 216 | 0 | 0 | 0 | 0 | 0 | 0 | 0 | 0 | 0 | 0 | 0 | 0 | 0 | 0 | 0 | 0 | 0 |
| | 11 | 152 | 0 | 0 | 0 | 0 | 0 | 0 | 0 | 0 | 0 | 0 | 0 | 0 | 0 | 0 | 0 | 0 | 0 |
| | 12 | 98 | 0 | 0 | 0 | 0 | 0 | 0 | 0 | 0 | 0 | 0 | 0 | 0 | 0 | 0 | 0 | 0 | 0 |
| | 13 | 43 | 0 | 0 | 0 | 0 | 0 | 0 | 0 | 0 | 0 | 0 | 0 | 0 | 0 | 0 | 0 | 0 | 0 |
| | 14 | 11 | 0 | 0 | 0 | 0 | 0 | 0 | 0 | 0 | 0 | 0 | 0 | 0 | 0 | 0 | 0 | 0 | 0 |
| | 15 | 9 | 0 | 0 | 0 | 0 | 0 | 0 | 0 | 0 | 0 | 0 | 0 | 0 | 0 | 0 | 0 | 0 | 0 |
| | 16 | 2 | 0 | 0 | 0 | 0 | 0 | 0 | 0 | 0 | 0 | 0 | 0 | 0 | 0 | 0 | 0 | 0 | 0 |
| | 17 | 1 | 0 | 0 | 0 | 0 | 0 | 0 | 0 | 0 | 0 | 0 | 0 | 0 | 0 | 0 | 0 | 0 | 0 |

[0508] The templates with disrupted MS, both the mono- and di-nucleotide repeats, fall into two cleanly separable groups: the vast majority, in which the consensus MS length of first copies all unanimously agree with the on-target length; and a much smaller number of outlier templates, in which none of their first copies have an on-target length. All outlier templates were further examined. For each of these, all first copies agree on their unexpected MS length, most commonly one base-pair less than the expected length. The lengths of unanimous templates are shown in Table 5.

TABLE 5
Lengths of unanimous templates
For the three libraries, M-18 (C++), D-26 (CA−), and D-26
(CA++), shown in FIG. 1.7, the number of templates with
unanimous first copies, for each possible length, is tabulated,
separated further by the number of first copies per template.
The vast majority of unanimous templates are of the expected
on-target length (18 or 26). Synthetic variant templates (3+
unanimous first copies) were removed before
the final error rate estimations.

| D-26 (CA−) | | number of first copies | | | |
|---|---|---|---|---|---|
| unmutated | | 1 | 2 | 3 | 4+ |
| unanimous | <=23 | 12 | 2 | 2 | 18 |
| template | 24 | 40 | 4 | 0 | 3 |
| MSL | 25 | 12 | 10 | 12 | 34 |
| | 26 | 1569 | 1454 | 1703 | 5520 |
| | 27 | 2 | 5 | 3 | 12 |
| | 28 | 1 | 0 | 0 | 0 |
| | >=29 | 1 | 0 | 0 | 0 |
| D-26 (CA++) | | number of first copies | | | |
| disrupted | | 1 | 2 | 3 | 4+ |
| unanimous | <=23 | 0 | 1 | 0 | 2 |
| template | 24 | 0 | 0 | 0 | 0 |
| MSL | 25 | 0 | 2 | 2 | 7 |
| | 26 | 86 | 43 | 41 | 665 |
| | 27 | 0 | 0 | 0 | 2 |
| | 28 | 0 | 0 | 0 | 0 |
| | >=29 | 0 | 0 | 0 | 0 |
| M-13 (C++) | | number of first copies | | | |
| disrupted | | 1 | 2 | 3 | 4+ |
| unanimous | <=15 | 0 | 0 | 0 | 2 |
| template | 16 | 0 | 0 | 0 | 1 |
| MSL | 17 | 5 | 0 | 0 | 17 |
| | 18 | 345 | 218 | 167 | 4384 |
| | 19 | 0 | 0 | 1 | 3 |
| | 20 | 0 | 0 | 0 | 0 |
| | >=21 | 0 | 0 | 0 | 0 |

[0509] The analysis of the unmutated D-26 (CA−) tract shows a more complex pattern (Table 6, part B). As before, a majority of templates are on-target, with all first copies in agreement. There is also a small proportion of outlier templates, unanimous in that no first copies have the on-target length, and as before, most of these are unanimous for another length, typically one base less than the expected length (see Table 5). It is noteworthy that relatively few of these outlier templates are +/−2 bp the target length, as would be expected from polymerase error. In addition, there is a third and fairly numerous group of templates in D-26 (CA−): those with a predominance of first copies of the on-target length, yet containing one or more first copies with an off-target length.

TABLE 6
parts A-C: Observed and simulated error moments
For the M-18 (C++), D-26 (CA−), and D-26 (CA++)
conditions, the table shows the Luria-Delbruck Diffusion (LDD)
per-round error rate parameter selected to best fit the observed data.
(Left) The results of the simulation are shown as number of reads
and first copies at length 26 and 24 (or 18 and 17), for each condition. (Right) Parallel
results after downsampling from observed data. The simulation total counts are
matched to the downsampled total counts. Further, the table
shows the proportion of first copies at each length, given N number of
unanimous reads for both simulated and downsampled data. Off-target counts
in the disrupted libraries are 0, due to the extremely low error rates of these conditions,
necessitating the estimation of error via simulation to accurately estimate error rates.
part A.

| | | D-26 (CA−) | | | |
|---|---|---|---|---|---|
| | | | | LDD simulated, | |
| | | observed | | α = 1.35E−02 | |
| MS length (L) | | 24 | 26 | 24 | 26 |
| number of reads | | 303,560.00 | 1,910,332.00 | 308,265.08 | 1,920,815.70 |
| number of first copies | | 1,047.00 | 39,557.00 | 957.93 | 39,733.44 |
| N-th | N = 1 | 0.133978 | 0.841325 | 0.135544 | 0.846076 |
| moment | N = 2 | 0.033846 | 0.729053 | 0.029580 | 0.731265 |
| for length | N = 3 | 0.017401 | 0.636207 | 0.013170 | 0.635169 |
| L | N = 4 | 0.013061 | 0.558259 | 0.009098 | 0.553591 |

part B.

| | | D-26 (CA++) | | | |
|---|---|---|---|---|---|
| | | | | LDD simulated, | |
| | | observed | | α = 4.95E−05 | |
| MS length (L) | | 24 | 26 | 24 | 26 |
| number of reads | | 2,453.00 | 4,312,537.00 | 2,482.78 | 4,315,256.48 |
| number of first copies | | 0.00 | 5,680.00 | 0.41 | 5,679.54 |
| N-th | N = 1 | 0.000578 | 0.998725 | 0.000575 | 0.999370 |
| moment | N = 2 | 0.000005 | 0.997459 | 0.000072 | 0.998820 |
| for length | N = 3 | 0.000000 | 0.996201 | 0.000055 | 0.998289 |
| L | N = 4 | 0.000000 | 0.994952 | 0.000050 | 0.997771 |

part C.

| | | M-18 (C++) | | | |
|---|---|---|---|---|---|
| | | | | LDD simulated, | |
| | | observed | | α = 2.80E−05 | |
| MS length (L) | | 17 | 18 | 17 | 18 |
| number of reads | | 509.00 | 1,612,051.00 | 532.80 | 1,612,048.90 |
| number of first copies | | 0.00 | 11,415.00 | 0.52 | 11,414.43 |
| N-th | N = 1 | 0.000324 | 0.999631 | 0.000330 | 0.999637 |
| moment | N = 2 | 0.000005 | 0.999268 | 0.000045 | 0.999323 |
| for length | N = 3 | 0.000000 | 0.998913 | 0.000035 | 0.999020 |
| L | N = 4 | 0.000000 | 0.998563 | 0.000032 | 0.998724 |

### Removing Synthetic Variants

[0510] Based on these studies, templates were declared to be synthetic variants if they had three or more first copies which were unanimous for an off-target length. For the three conditions just discussed, MS length error rates were determined following removal of the synthetic variant templates. To do this fairly, after excluding synthetic variant templates, well-covered first copies and the reads associated with them were considered if and only if they derive from well-covered templates, that is, templates with at least three well-covered first copies. MS length read error was therefore estimated from three of the five conditions shown in Table 3, part A, partitioning the error by its deviation from the expected length. The read error rates for disrupted reads in the mutated M-18 (C++) and D-26 (CA++) data are on the order of 10⁻³ or better, but remain at about 16% for the unmutated D-26 (CA−) data. Almost all of the erroneous reads in the D-26 (CA−) have MS lengths of 24. The erroneous reads for D-26 (CA++) are almost equally divided between lengths 24 and 25 (−2 and −1). The former value probably arises from residual tandem repeats following disruption. Consistent with this, error rates as a function of disruption parameters (Table 7) were examined, and it was noted that if these parameters had been more restrictive, the read error rates could be reduced further.

[0511] In Table 6, for the two mutated libraries, the read off-target rate, and number of reads retained, were analyzed as a function of the two disruption parameters. The max repeat length is varied from 3 to 18 for the M-18 library and 3 to 13 for the D-26 library, with the conversion rate thresholds varying from 0.45 to 0.55 as the strictest threshold, to 0.05 to 0.95 to the loosest threshold. Highlighted in bold are the values for the parameter range in the main analysis. Error rates can be reduced further by using stricter disruption thresholds, though yield is also affected by this choice.

TABLE 7
Error rates as functions of disruption parameters

| off-target error rate | | | | | | | total reads | | | | | | |
|---|---|---|---|---|---|---|---|---|---|---|---|---|---|
| | | conversion rate | | | | | | | conversion rate | | | | |
| | | 0.45 to | 0.35 to | 0.25 to | 0.15 to | 0.05 to | | | 0.45 to | 0.35 to | 0.25 to | 0.15 to | 0.05 to |
| M-18 (C+) | | 0.55 | 0.65 | 0.75 | 0.85 | 0.95 | M-18 (C+) | | 0.55 | 0.65 | 0.75 | 0.85 | 0.95 |
| max | 3 | 0.00006 | 0.00023 | 0.00019 | 0.00019 | 0.00019 | max | 3 | 16,498 | 142,292 | 209,475 | 209,475 | 209,475 |
| repeat | 4 | 0.00019 | 0.00028 | 0.00030 | 0.00029 | 0.00029 | repeat | 4 | 42,073 | 327,327 | 710,829 | 763,980 | 763,980 |
| length | 5 | 0.00033 | 0.00041 | 0.00039 | 0.00036 | 0.00036 | length | 5 | 53,810 | 478,676 | 1,293,599 | 1,612,051 | 1,612,051 |
| | 6 | 0.00037 | 0.00052 | 0.00052 | 0.00049 | 0.00049 | | 6 | 56,776 | 549,659 | 1,657,838 | 2,314,420 | 2,333,714 |
| | 7 | 0.00046 | 0.00064 | 0.00076 | 0.00076 | 0.00076 | | 7 | 58,761 | 578,090 | 1,912,390 | 3,010,653 | 3,099,788 |
| | 8 | 0.00046 | 0.00081 | 0.00125 | 0.00149 | 0.00152 | | 8 | 58,761 | 586,201 | 2,051,114 | 3,480,046 | 3,677,449 |
| | 9 | 0.00046 | 0.00129 | 0.00244 | 0.00346 | 0.00381 | | 9 | 58,761 | 596,911 | 2,133,730 | 3,845,816 | 4,212,495 |
| | 10 | 0.00046 | 0.00165 | 0.00364 | 0.00657 | 0.00752 | | 10 | 58,761 | 596,937 | 2,161,177 | 4,062,573 | 4,567,219 |
| | 11 | 0.00046 | 0.00165 | 0.00503 | 0.01006 | 0.01256 | | 11 | 58,761 | 596,937 | 2,181,856 | 4,201,911 | 4,829,834 |
| | 12 | 0.00046 | 0.00165 | 0.00603 | 0.01316 | 0.01732 | | 12 | 58,761 | 596,937 | 2,192,165 | 4,278,100 | 4,996,345 |
| | 13 | 0.00046 | 0.00165 | 0.00618 | 0.01533 | 0.02243 | | 13 | 58,761 | 596,937 | 2,193,567 | 4,314,939 | 5,116,197 |
| | 14 | 0.00046 | 0.00165 | 0.00618 | 0.01686 | 0.02748 | | 14 | 58,761 | 596,937 | 2,193,567 | 4,336,144 | 5,199,032 |
| | 15 | 0.00046 | 0.00165 | 0.00618 | 0.01756 | 0.03247 | | 15 | 58,761 | 596,937 | 2,193,567 | 4,343,171 | 5,253,745 |
| | 16 | 0.00046 | 0.00165 | 0.00618 | 0.01756 | 0.03645 | | 16 | 58,761 | 596,937 | 2,193,567 | 4,343,171 | 5,284,561 |
| | 17 | 0.00046 | 0.00165 | 0.00618 | 0.01756 | 0.03913 | | 17 | 58,761 | 596,937 | 2,193,567 | 4,343,171 | 5,303,142 |
| | 18 | 0.00046 | 0.00165 | 0.00618 | 0.01756 | 0.03923 | | 18 | 58,761 | 596,937 | 2,193,567 | 4,343,171 | 5,303,367 |

| off-target error rate | | | | | | | total reads | | | | | | |
|---|---|---|---|---|---|---|---|---|---|---|---|---|---|
| | | conversion rate | | | | | | | conversion rate | | | | |
| | | 0.45 to | 0.35 to | 0.25 to | 0.15 to | 0.05 to | | | 0.45 to | 0.35 to | 0.25 to | 0.15 to | 0.05 to |
| D-26 (CA+) | | 0.55 | 0.65 | 0.75 | 0.85 | 0.95 | D-26 (CA+) | | 0.55 | 0.65 | 0.75 | 0.85 | 0.95 |
| max | 3 | 0.00070 | 0.00072 | 0.00074 | 0.00073 | 0.00073 | max | 3 | 865,694 | 1,418,594 | 1,781,407 | 1,831,219 | 1,831,219 |
| repeat | 4 | 0.00071 | 0.00072 | 0.00076 | 0.00077 | 0.00077 | repeat | 4 | 1,178,692 | 2,105,597 | 2,890,865 | 3,187,149 | 3,187,149 |
| length | 5 | 0.00089 | 0.00126 | 0.00193 | 0.00195 | 0.00195 | length | 5 | 1,299,708 | 2,443,743 | 3,556,909 | 4,313,533 | 4,313,533 |
| | 6 | 0.00154 | 0.00197 | 0.00350 | 0.00469 | 0.00474 | | 6 | 1,355,061 | 2,554,528 | 3,865,372 | 5,021,134 | 5,030,078 |
| | 7 | 0.00190 | 0.00260 | 0.00589 | 0.00933 | 0.00962 | | 7 | 1,361,644 | 2,569,339 | 3,978,289 | 5,397,530 | 5,448,898 |
| | 8 | 0.00190 | 0.00322 | 0.00738 | 0.01381 | 0.01421 | | 8 | 1,361,644 | 2,581,850 | 4,022,127 | 5,575,130 | 5,637,667 |
| | 9 | 0.00190 | 0.00322 | 0.00738 | 0.01722 | 0.01870 | | 9 | 1,361,644 | 2,581,850 | 4,022,127 | 5,620,895 | 5,696,458 |
| | 10 | 0.00190 | 0.00322 | 0.00738 | 0.02062 | 0.02353 | | 10 | 1,361,644 | 2,581,850 | 4,022,127 | 5,662,875 | 5,757,976 |
| | 11 | 0.00190 | 0.00322 | 0.00738 | 0.02173 | 0.02553 | | 11 | 1,361,644 | 2,581,850 | 4,022,127 | 5,674,069 | 5,774,619 |
| | 12 | 0.00190 | 0.00322 | 0.00738 | 0.02173 | 0.02739 | | 12 | 1,361,644 | 2,581,850 | 4,022,127 | 5,674,069 | 5,790,936 |
| | 13 | 0.00190 | 0.00322 | 0.00738 | 0.02173 | 0.02739 | | 13 | 1,361,644 | 2,581,850 | 4,022,127 | 5,674,069 | 5,790,936 |

[0512] In Table 3, part B, first copy error is similarly shown, before and after removal for synthetic variants. After removal, there are 11,415 and 5,680 first copies in the M-18 (C++) and D-26 (CA++) data, respectively, 100% of which are of the expected length. First copy error for the CA− is reduced somewhat, but stands at about 3%. Most of the errors are to lengths of 24, two less than the target length, the error expected from slippage of one repeat unit.

### Example 1G: Determining Limits of Detection

[0513] As established above, disruption reduces read error rates to 10⁻³ or better. This section demonstrates that multiple disrupted reads, either from the same first copy or preferably from multiple first copies from the same initial template, achieve error rates of 10⁻⁶ or better, whereas without disruption error rates are not better than 10⁻² for CA−, the relatively stable repeat tract.

[0514] To measure error rates as a function of multiple reads the method of moments is used. For a given condition and template, the N^{th} moment of L is defined as the probability of observing unanimous agreement of length L for N reads from the same first copy. With moments, the probability of reads unanimous for length L with a configuration of N[j] reads over J first copies from the same template can be estimated by multiplying the N[j] moments of L.

[0515] For the three conditions, CA−, CA++, and C++, the moments are shown in Table 6 for both the expected lengths (26, 26 and 18) and for the most commonly observed length error, a 1-unit deletion (24, 24 and 17, respectively). Note that the N-th moments are not powers of the first moment, because the moments account for variation in error rates across first copies. This variation is inherent in exponential growth, a mathematical insight first noted by Luria-Delbruck (Luria, S. E. & Delbrück, 1943).

[0516] In the CA-data, the first moment for 24 matches the average read error rate of 1.3×10⁻¹. The second moment for that length in CA-diminishes to 3.4×10⁻² reflecting increased accuracy from two unanimous reads. The third and fourth moments continue the downward trend but will plateau, reflecting that for large N, the moments cannot be lower than the first-round error rate. This is estimated from the data to be about 1.3×10⁻² for CA−.

[0517] For the disrupted datasets, CA++ and C++, the first moments for off-target also match the average read error rates of 5.8×10⁻⁴ and 3.2×10⁻⁴, respectively. The probability of seeing two unanimous off-target reads, the 2nd moment, dramatically decreases to 5×10⁻⁶. The higher moments are vanishingly small. However, due to the number of observable first copies (5680 for CA++ and 11415 for C++, see Table 1.3) and low error rate, no first-round error in any copy are observed (FIG. 9), so these values cannot plateau. It was therefore likely that the tail of the distribution that define the higher moments is underestimated by this approach.

[0518] To obtain a better approximation for the higher moments, a Luria Delbruck Diffusion (LDD) model that simulates error during amplification is used (see Example 1D for details). In addition to providing a simulation of the higher moments, a good LDD fit to the data can provide an estimate of per round error rate. With a good estimate of the per round error rate, one can also accurately simulate any number of rounds of amplification.

[0519] A simple LDD model has four parameters: efficiency of replication (e=0.95), the number of rounds of replication (R=23), and two per round length error rates: one unit decrease (α), and one unit increase (β). For each dataset, LDD distributions are numerically generated over a grid of α and β, and the grid-point where the read error-rates (1^{st} moments) best match the empirical data are selected. Table 6 also shows the best-fit a parameter, the per round error of decreasing by one repeat unit, for each dataset along with simulations for the read and first copy error rates and the four moments.

[0520] For the CA− data, a per-round error rate of 1.36×10⁻² was estimated. As this was chosen to match the read-error rate, a good match for the first moment is seen. However, the corresponding LDD distribution also recapitulates the first copy rates and the higher moments of the sample distribution. For the disrupted datasets, CA++ and C++, the per-round error rate of 4.95×10⁻⁵ and 2.80×10⁻⁵, respectively was estimated. The expected number of first copy errors for CA++ and C++ given the size of these datasets are 0.41 (out of 5,680) and 0.52 (out of 11,415), respectively, whereas none were in fact observed. The LDD simulated estimates for the higher moments are therefore higher than the estimates made from the observed distributions.

[0521] Using the LDD sample moments, it is possible to estimate detection limits for various unanimous read configurations. Six examples are shown in Table 8 for CA− and CA++ templates. It is clear that the disrupted microsatellites are measured with at least three orders of magnitude lower error than undisrupted microsatellites. Moreover, obtaining reads from the same first copy has a higher error rate than the same number of reads from multiple first copies. Given three unanimous reads over two first copies, less than one in ten million CA++ templates with MSL of 26 would be mistaken as having a MSL of 24. Under conditions of disruption, a limit of detection is estimated to be at or below one in a million, enabling highly sensitive detection of rare microsatellite length variants in biological samples.

TABLE 8
Error rates with unanimous lengths by condition and read configuration
For the D-26 (CA−) and D-26 (CA++) conditions, the LDD simulation
results are used to show expected rates of observing length 24 in
error, depending on the number of first copies and the read configuration
across those first copies. Error rates are orders of magnitude lower
when reads are distributed over multiple first copies.

| | | | D-26 (CA−) | | D-26 (CA++) | |
|---|---|---|---|---|---|---|
| | | first | unmutated | | disrupted | |
| configuration | reads | copies | 24 | 26 | 24 | 26 |
| 1 | 1 | 1 | 1.4E−01 | 0.846 | 5.7E−04 | 0.999 |
| 2 | 2 | 1 | 3.0E−02 | 0.731 | 7.2E−05 | 0.999 |
| 3 | 3 | 1 | 1.3E−02 | 0.635 | 5.5E−05 | 0.998 |
| 1, 1 | 2 | 2 | 1.8E−02 | 0.716 | 3.3E−07 | 0.999 |
| 2, 1 | 3 | 2 | 4.0E−03 | 0.619 | 4.2E−08 | 0.998 |
| 1, 1, 1 | 3 | 3 | 2.5E−03 | 0.606 | 1.9E−10 | 0.998 |

### Example 2—Preparation and Analysis Steps of a Disrupted Microsatellite Library

[0522] This example and corresponding FIG. 10 demonstrate the library preparation and analysis steps of a library of templates with disrupted microsatellites, beginning from biological specimen DNA. It illustrates the impact of mild and heavy disruption on the stability of microsatellite lengths during this process.

### Structure of the Initial Templates.

[0523] Initial templates can be prepared as single or double stranded DNA fragments. In this example, they are extracted from biological specimens. They can be enriched for fragments corresponding to certain genomic loci. The templates of interest have the following structural features: a microsatellite (i.e., a direct repeat motif structure, with N motifs, indicated by the arrows) and flanking sequences on either side of the microsatellite that delineate the ends of the microsatellite region and thereby determining the length L of the repeat region (as indicated in the figure). The purpose of the procedures that follow is to allow the determination of this length L accurately (i.e., with low error).

### Step 1. Tagging the Initial Templates.

[0524] Initial templates are tagged in a way such that individual templates can be distinguished, and subsequent copies retain information from the tags. When initial templates are synthetic, they may be synthesized with individual tags from the beginning, in which case a step of tagging is not needed. Without limitation, the individual tags, also referred to herein as “individual identifiers”, may be any combination of: (1) randomized nucleotide sequences added to the ends of templates by extension or ligation (i.e., varietal tags); (2) diverse fragment end positions created during extraction from biological specimens or following treatment with non-specific endonucleases; or (3) a pattern of partial mutation, as introduced into the initial template in the next step. Thus, a step of tagging is not absolutely required by the method if diverse fragment end positions, or a pattern of partial mutation, is used as an individual identifier. As a result of this tagging, two or more copies derived from the same initial template can be so identified. Aggregating read information over identifiable templates reduces error in determining the length of initial templates (see steps 6 through 8)

### Step 2. Partial Mutagenesis of the Initial Templates.

[0525] These templates are mutagenized or further mutagenized with the aim of causing disruption of the microsatellite tandem repeat structure. This can be an enzymatic or chemical procedure that alters the base pairing functionality of the initial template. In this example, the process of mutagenesis does not alter the length L between the flanks or the number of repeat units. However, the degree of change to the microsatellite might vary between different templates. Some might have no mutation, and so the structure is not disrupted (left column); some might be lightly mutagenized, resulting in a mildly disrupted repeat structure; some might be sufficiently mutagenized that the structure is highly disrupted; and some might be heavily mutagenized so that a mildly disrupted repeat structure re-emerges (right most column). This happens, for example, if almost all the C's are converted to U's. The degree of microsatellite disruption determines the replicative error of length. (See Example 1, Table 7 and Discussion, FIG. 13)

Step 3. Linear Amplification with New Tags.

[0526] This step is optional to the method, but making multiple distinct first copies by linear amplification, and collecting read information from copies of distinct first copies reduces the error in determining the length of initial templates (see steps 6, 7 and 8). This is because error rates compound during exponential amplification. If first copies are made, and each first copy is tagged individually, it is possible to determine when two sequence reads came from the same first copy. The first copies can contain errors in length, as indicated in the diagram, but these errors are reduced in templates with highly disrupted tandem repeat structures.

### Step 4. Exponential Amplification

[0527] Exponential amplification generates many more copies of each initial template or of the first copies of the initial templates. These copies retain the identify information (i.e. ID #3A) that was present on the molecules before exponential amplification. This step may involve 5 to 40 rounds of polymerase chain reaction (PCR), generating on the order of 2\hat{ }K copies, where K is the number of rounds of PCR. The high error rate of copying microsatellites leads to a high probability of the length L in a copy being different from its predecessor molecule (indicated as −1, +1, etc. in circles). Highly disrupted molecules are significantly more stable during this process, resulting in few changes in microsatellite lengths, as demonstrated in the diagram. Exponential amplification, or some other amplification process, is generally needed to generate enough molecules to make sequencing libraries and satisfy the input conditions of the sequencing platform.

### Step 5. Sequencing Reads and Length Measurement

[0528] From the many copies of the template present at step 5, some number are read out by the sequencing platform as sequencing reads. The length of the microsatellite in a sequencing read is determined by the difference in the position of the left and right flank in the read (FIG. 2). Both the left and right flank sequence (flanking portions) should be at least partially identified in a read to determine its microsatellite length L. The step 6 histograms show the distribution of read lengths observed for a template of length L, under the different disruption paradigms. The proportion of reads with MS lengths that match the length of the initial template (lighter grey) increases with mild disruption, and drastically increases with high levels of disruption.

### Step 6. Aggregate Read Lengths Over First Copies

[0529] Reads are aggregated by their first copy identity and a consensus length is determined for each first copy. These first copy consensus lengths are plotted in the step 7 histograms. Error in length measurement is reduced when looking at first copy consensus lengths compared to read lengths alone.

### Step 7. Aggregate First Copy Lengths Over Initial Templates

[0530] A further aggregation can then be done over all first copies with the same template identity to determine the template consensus length, shown in step 8. There are many ways to determine a consensus length, including but not limited to taking the plurality length, or requiring a majority length. See Example 1C for a more detailed description of possible sequence processing.

### Example 3—Enrichment of Microsatellite Loci in a Sequencing Library

[0531] This example discusses the process of enrichment of microsatellite loci in a sequencing library. It describes a possible algorithm for selecting loci for the enrichment panel; a protocol for generating enriched sequencing libraries; the analysis steps for processing sequencing reads; the method performance; and possible variations on the method.

### Example 3a: Selection of Microsatellite Loci for Enrichment Panel

[0532] The composition of panels for enrichment of two classes of microsatellites, mononucleotide C tracts, and dinucleotide AC tracts, are illustrated.

[0533] The properties for a collection of oligonucleotides used to comprise a panel and enrich microsatellites are: each oligonucleotide should flank a microsatellite locus; be of length 30 or greater to ensure good hybridization capture; the microsatellites enriched should not be so short that its length is stable under replication; the flank to flank distance should not be so long that the distance between them does not fit into a single read of a short read sequencing platform; the flank sequences themselves should map uniquely, either to the whole genome, or to the set of flanks enriched by the panel; and flanks should not contain within them sequences that would promote spurious capture of other parts of the genome and thereby reduce the purity of the captured product.

[0534] An initial list of microsatellite (MS) loci in the hg19 human reference genome was downloaded from the MicroSatellite DataBase (Avvaru, A. K., et al., 2020). C and AC microsatellites of total length 12 to 64 were selected for further consideration (N=169,926). Microsatellites on alternate haplotype contigs were excluded (leaving N=168,551). A series of checks on the uniqueness of 60 base pair flanks in the reference genome were employed to reduce the list. The following criteria were applied to both flanks: (1) all length 21 subsequences of the 60 base left and right MS flanks are unique in the hg19 reference genome (N=26,682); (2) the minimum hamming distance of the each of the 60 base flanks to the rest of the reference genome (and its reverse complement) is at least 20 (N=15,405); (3) 60 base flank sequences mapped using Bowtie2 to the hg38 reference genome, allowing indels, map only once and at the same separation as in hg19 (N=15,313). In addition, all microsatellite loci within 200 bases of another were excluded (N=14,910), and loci within or nearby the PAR regions on chromosome X and Y were excluded (N=14,893). These criteria can be relaxed or made more stringent, or additional criteria added.

[0535] From this filtered list, the two flanks from 630 C-MS and 630 AC-MS loci selected at random were chosen to make two panels, and then to test the utility of panels. Larger or smaller sets of flanks could be made. The composition of this panel is found in Table 9 (C-MS) and Table 10 (AC-MS).

TABLE 9
List of capture probe sequences in C panel
Genomic coordinates, sequences, and strand information are listed for microsatellite
flanking sequences of 630 loci containing mononucleotide-C microsatellites, used in a
hybridization capture panel.

| | start | end | | | | 5′ flank | 3′ flank | |
|---|---|---|---|---|---|---|---|---|
| | position | position | | length in | | SEQ ID | SEQ ID | MS SEQ |
| chr | (hg38) | (hg38) | strand | reference | locus id | NO | NO | ID NO |
| chr1 | 1028320 | 1028336 | + | 16 | C-1 | 1 | 631 | 1261 |
| chr1 | 1302795 | 1302807 | + | 12 | C-2 | 2 | 632 | 1262 |
| chr1 | 3900328 | 3900346 | + | 18 | C-3 | 3 | 633 | 1263 |
| chr1 | 4329942 | 4329954 | − | 12 | C-4 | 4 | 634 | 1264 |
| chr1 | 6260376 | 6260390 | + | 14 | C-5 | 5 | 635 | 1265 |
| chr1 | 7230432 | 7230444 | + | 12 | C-6 | 6 | 636 | 1266 |
| chr1 | 7493643 | 7493658 | − | 15 | C-7 | 7 | 637 | 1267 |
| chr1 | 8018373 | 8018387 | − | 14 | C-8 | 8 | 638 | 1268 |
| chr1 | 8350635 | 8350649 | + | 14 | C-9 | 9 | 639 | 1269 |
| chr1 | 10537341 | 10537353 | + | 12 | C-10 | 10 | 640 | 1270 |
| chr1 | 18528054 | 18528071 | − | 17 | C-11 | 11 | 641 | 1271 |
| chr1 | 19963046 | 19963059 | + | 13 | C-12 | 12 | 642 | 1272 |
| chr1 | 21634058 | 21634073 | − | 15 | C-13 | 13 | 643 | 1273 |
| chr1 | 22720660 | 22720673 | + | 13 | C-14 | 14 | 644 | 1274 |
| chr1 | 23531350 | 23531367 | + | 17 | C-15 | 15 | 645 | 1275 |
| chr1 | 24187434 | 24187446 | − | 12 | C-16 | 16 | 646 | 1276 |
| chr1 | 24643482 | 24643496 | + | 14 | C-17 | 17 | 647 | 1277 |
| chr1 | 24869979 | 24869992 | + | 13 | C-18 | 18 | 648 | 1278 |
| chr1 | 25090366 | 25090379 | − | 13 | C-19 | 19 | 649 | 1279 |
| chr1 | 26306829 | 26306841 | − | 12 | C-20 | 20 | 650 | 1280 |
| chr1 | 26993577 | 26993595 | − | 18 | C-21 | 21 | 651 | 1281 |
| chr1 | 27602986 | 27602998 | + | 12 | C-22 | 22 | 652 | 1282 |
| chr1 | 30893303 | 30893317 | + | 14 | C-23 | 23 | 653 | 1283 |
| chr1 | 33742577 | 33742590 | + | 13 | C-24 | 24 | 654 | 1284 |
| chr1 | 40668491 | 40668504 | − | 13 | C-25 | 25 | 655 | 1285 |
| chr1 | 44010456 | 44010471 | − | 15 | C-26 | 26 | 656 | 1286 |
| chr1 | 45629454 | 45629467 | + | 13 | C-27 | 27 | 657 | 1287 |
| chr1 | 51236498 | 51236511 | + | 13 | C-28 | 28 | 658 | 1288 |
| chr1 | 51306853 | 51306865 | + | 12 | C-29 | 29 | 659 | 1289 |
| chr1 | 52263753 | 52263768 | + | 15 | C-30 | 30 | 660 | 1290 |
| chr1 | 57061228 | 57061240 | − | 12 | C-31 | 31 | 661 | 1291 |
| chr1 | 68231857 | 68231872 | − | 15 | C-32 | 32 | 662 | 1292 |
| chr1 | 87331063 | 87331079 | + | 16 | C-33 | 33 | 663 | 1293 |
| chr1 | 92441444 | 92441456 | + | 12 | C-34 | 34 | 664 | 1294 |
| chr1 | 93988609 | 93988622 | − | 13 | C-35 | 35 | 665 | 1295 |
| chr1 | 99265144 | 99265156 | + | 12 | C-36 | 36 | 666 | 1296 |
| chr1 | 109483792 | 109483806 | − | 14 | C-37 | 37 | 667 | 1297 |
| chr1 | 155053107 | 155053120 | + | 13 | C-38 | 38 | 668 | 1298 |
| chr1 | 156248531 | 156248549 | + | 18 | C-39 | 39 | 669 | 1299 |
| chr1 | 158014680 | 158014693 | − | 13 | C-40 | 40 | 670 | 1300 |
| chr1 | 163071855 | 163071873 | + | 18 | C-41 | 41 | 671 | 1301 |
| chr1 | 164618297 | 164618310 | − | 13 | C-42 | 42 | 672 | 1302 |
| chr1 | 164674847 | 164674862 | + | 15 | C-43 | 43 | 673 | 1303 |
| chr1 | 166157036 | 166157049 | − | 13 | C-44 | 44 | 674 | 1304 |
| chr1 | 166973612 | 166973625 | + | 13 | C-45 | 45 | 675 | 1305 |
| chr1 | 201428047 | 201428060 | + | 13 | C-46 | 46 | 676 | 1306 |
| chr1 | 204412052 | 204412079 | − | 27 | C-47 | 47 | 677 | 1307 |
| chr1 | 204482109 | 204482126 | − | 17 | C-48 | 48 | 678 | 1308 |
| chr1 | 205457567 | 205457580 | − | 13 | C-49 | 49 | 679 | 1309 |
| chr1 | 212609375 | 212609388 | − | 13 | C-50 | 50 | 680 | 1310 |
| chr1 | 214465035 | 214465050 | + | 15 | C-51 | 51 | 681 | 1311 |
| chr1 | 215568485 | 215568500 | + | 15 | C-52 | 52 | 682 | 1312 |
| chr1 | 217051204 | 217051216 | − | 12 | C-53 | 53 | 683 | 1313 |
| chr1 | 218489116 | 218489128 | + | 12 | C-54 | 54 | 684 | 1314 |
| chr1 | 224205632 | 224205644 | + | 12 | C-55 | 55 | 685 | 1315 |
| chr1 | 225857384 | 225857397 | − | 13 | C-56 | 56 | 686 | 1316 |
| chr1 | 228208907 | 228208919 | − | 12 | C-57 | 57 | 687 | 1317 |
| chr1 | 228848501 | 228848514 | + | 13 | C-58 | 58 | 688 | 1318 |
| chr1 | 234429764 | 234429777 | − | 13 | C-59 | 59 | 689 | 1319 |
| chr1 | 237833351 | 237833363 | + | 12 | C-60 | 60 | 690 | 1320 |
| chr1 | 240967568 | 240967581 | − | 13 | C-61 | 61 | 691 | 1321 |
| chr1 | 242132192 | 242132207 | − | 15 | C-62 | 62 | 692 | 1322 |
| chr1 | 243473922 | 243473939 | − | 17 | C-63 | 63 | 693 | 1323 |
| chr1 | 243918679 | 243918691 | + | 12 | C-64 | 64 | 694 | 1324 |
| chr1 | 247347581 | 247347596 | + | 15 | C-65 | 65 | 695 | 1325 |
| chr2 | 4782008 | 4782020 | − | 12 | C-66 | 66 | 696 | 1326 |
| chr2 | 10659341 | 10659354 | − | 13 | C-67 | 67 | 697 | 1327 |
| chr2 | 16117209 | 16117221 | + | 12 | C-68 | 68 | 698 | 1328 |
| chr2 | 18747547 | 18747560 | − | 13 | C-69 | 69 | 699 | 1329 |
| chr2 | 23379446 | 23379467 | − | 21 | C-70 | 70 | 700 | 1330 |
| chr2 | 23525726 | 23525738 | + | 12 | C-71 | 71 | 701 | 1331 |
| chr2 | 25230790 | 25230807 | − | 17 | C-72 | 72 | 702 | 1332 |
| chr2 | 28394137 | 28394150 | + | 13 | C-73 | 73 | 703 | 1333 |
| chr2 | 46393945 | 46393960 | − | 15 | C-74 | 74 | 704 | 1334 |
| chr2 | 47172807 | 47172823 | − | 16 | C-75 | 75 | 705 | 1335 |
| chr2 | 48344840 | 48344852 | + | 12 | C-76 | 76 | 706 | 1336 |
| chr2 | 48752981 | 48752996 | − | 15 | C-77 | 77 | 707 | 1337 |
| chr2 | 51001234 | 51001246 | − | 12 | C-78 | 78 | 708 | 1338 |
| chr2 | 60410927 | 60410942 | − | 15 | C-79 | 79 | 709 | 1339 |
| chr2 | 61538041 | 61538054 | + | 13 | C-80 | 80 | 710 | 1340 |
| chr2 | 64987648 | 64987662 | + | 14 | C-81 | 81 | 711 | 1341 |
| chr2 | 66889220 | 66889232 | + | 12 | C-82 | 82 | 712 | 1342 |
| chr2 | 69644165 | 69644182 | + | 17 | C-83 | 83 | 713 | 1343 |
| chr2 | 86068386 | 86068398 | − | 12 | C-84 | 84 | 714 | 1344 |
| chr2 | 98770352 | 98770364 | + | 12 | C-85 | 85 | 715 | 1345 |
| chr2 | 103873541 | 103873554 | + | 13 | C-86 | 86 | 716 | 1346 |
| chr2 | 153872619 | 153872634 | − | 15 | C-87 | 87 | 717 | 1347 |
| chr2 | 170033581 | 170033595 | + | 14 | C-88 | 88 | 718 | 1348 |
| chr2 | 170817225 | 170817238 | + | 13 | C-89 | 89 | 719 | 1349 |
| chr2 | 175620814 | 175620826 | − | 12 | C-90 | 90 | 720 | 1350 |
| chr2 | 190860921 | 190860933 | + | 12 | C-91 | 91 | 721 | 1351 |
| chr2 | 207113607 | 207113620 | − | 13 | C-92 | 92 | 722 | 1352 |
| chr2 | 216803881 | 216803893 | − | 12 | C-93 | 93 | 723 | 1353 |
| chr2 | 217393488 | 217393500 | + | 12 | C-94 | 94 | 724 | 1354 |
| chr2 | 222318771 | 222318783 | + | 12 | C-95 | 95 | 725 | 1355 |
| chr2 | 222559161 | 222559175 | + | 14 | C-96 | 96 | 726 | 1356 |
| chr2 | 226030493 | 226030506 | − | 13 | C-97 | 97 | 727 | 1357 |
| chr2 | 230752029 | 230752043 | + | 14 | C-98 | 98 | 728 | 1358 |
| chr2 | 240724934 | 240724951 | − | 17 | C-99 | 99 | 729 | 1359 |
| chr2 | 241095060 | 241095075 | + | 15 | C-100 | 100 | 730 | 1360 |
| chr2 | 241236977 | 241236994 | − | 17 | C-101 | 101 | 731 | 1361 |
| chr3 | 12985490 | 12985502 | + | 12 | C-102 | 102 | 732 | 1362 |
| chr3 | 13145804 | 13145816 | − | 12 | C-103 | 103 | 733 | 1363 |
| chr3 | 17251425 | 17251438 | + | 13 | C-104 | 104 | 734 | 1364 |
| chr3 | 24198452 | 24198466 | + | 14 | C-105 | 105 | 735 | 1365 |
| chr3 | 31516706 | 31516718 | + | 12 | C-106 | 106 | 736 | 1366 |
| chr3 | 37453115 | 37453130 | + | 15 | C-107 | 107 | 737 | 1367 |
| chr3 | 41961550 | 41961570 | + | 20 | C-108 | 108 | 738 | 1368 |
| chr3 | 48154362 | 48154374 | + | 12 | C-109 | 109 | 739 | 1369 |
| chr3 | 49051584 | 49051596 | + | 12 | C-110 | 110 | 740 | 1370 |
| chr3 | 50321815 | 50321828 | − | 13 | C-111 | 111 | 741 | 1371 |
| chr3 | 53816133 | 53816145 | + | 12 | C-112 | 112 | 742 | 1372 |
| chr3 | 59879919 | 59879932 | + | 13 | C-113 | 113 | 743 | 1373 |
| chr3 | 62215546 | 62215558 | + | 12 | C-114 | 114 | 744 | 1374 |
| chr3 | 62402239 | 62402251 | − | 12 | C-115 | 115 | 745 | 1375 |
| chr3 | 66182716 | 66182728 | − | 12 | C-116 | 116 | 746 | 1376 |
| chr3 | 70973835 | 70973848 | + | 13 | C-117 | 117 | 747 | 1377 |
| chr3 | 71009155 | 71009168 | − | 13 | C-118 | 118 | 748 | 1378 |
| chr3 | 71389238 | 71389252 | − | 14 | C-119 | 119 | 749 | 1379 |
| chr3 | 82010525 | 82010537 | − | 12 | C-120 | 120 | 750 | 1380 |
| chr3 | 108074711 | 108074723 | − | 12 | C-121 | 121 | 751 | 1381 |
| chr3 | 120560065 | 120560080 | + | 15 | C-122 | 122 | 752 | 1382 |
| chr3 | 123373758 | 123373771 | + | 13 | C-123 | 123 | 753 | 1383 |
| chr3 | 124045749 | 124045762 | − | 13 | C-124 | 124 | 754 | 1384 |
| chr3 | 126343152 | 126343179 | + | 27 | C-125 | 125 | 755 | 1385 |
| chr3 | 126815643 | 126815656 | + | 13 | C-126 | 126 | 756 | 1386 |
| chr3 | 128491208 | 128491220 | + | 12 | C-127 | 127 | 757 | 1387 |
| chr3 | 129121068 | 129121082 | + | 14 | C-128 | 128 | 758 | 1388 |
| chr3 | 133827746 | 133827761 | + | 15 | C-129 | 129 | 759 | 1389 |
| chr3 | 156720841 | 156720853 | + | 12 | C-130 | 130 | 760 | 1390 |
| chr3 | 157860651 | 157860665 | − | 14 | C-131 | 131 | 761 | 139 |
| chr3 | 158105032 | 158105044 | + | 12 | C-132 | 132 | 762 | 1392 |
| chr3 | 191329942 | 191329956 | − | 14 | C-133 | 133 | 763 | 1393 |
| chr4 | 1570950 | 1570962 | − | 12 | C-134 | 134 | 764 | 1394 |
| chr4 | 3463450 | 3463462 | − | 12 | C-135 | 135 | 765 | 1395 |
| chr4 | 4857065 | 4857082 | + | 17 | C-136 | 136 | 766 | 1396 |
| chr4 | 7536832 | 7536844 | − | 12 | C-137 | 137 | 767 | 1397 |
| chr4 | 8143159 | 8143171 | − | 12 | C-138 | 138 | 768 | 1398 |
| chr4 | 23221317 | 23221331 | + | 14 | C-139 | 139 | 769 | 1399 |
| chr4 | 30717034 | 30717055 | − | 21 | C-140 | 140 | 770 | 1400 |
| chr4 | 37335300 | 37335312 | − | 12 | C-141 | 141 | 771 | 1401 |
| chr4 | 37797883 | 37797896 | − | 13 | C-142 | 142 | 772 | 1402 |
| chr4 | 41216419 | 41216442 | − | 23 | C-143 | 143 | 773 | 1403 |
| chr4 | 48687492 | 48687506 | − | 14 | C-144 | 144 | 774 | 1404 |
| chr4 | 54440079 | 54440094 | − | 15 | C-145 | 145 | 775 | 1405 |
| chr4 | 102799832 | 102799844 | − | 12 | C-146 | 146 | 776 | 1406 |
| chr4 | 110198074 | 110198087 | + | 13 | C-147 | 147 | 777 | 1407 |
| chr4 | 110631414 | 110631427 | − | 13 | C-148 | 148 | 778 | 1408 |
| chr4 | 112324974 | 112324986 | − | 12 | C-149 | 149 | 779 | 1409 |
| chr4 | 112652293 | 112652306 | + | 13 | C-150 | 150 | 780 | 1410 |
| chr4 | 117494525 | 117494537 | + | 12 | C-151 | 151 | 781 | 1411 |
| chr4 | 127578796 | 127578808 | − | 12 | C-152 | 152 | 782 | 1412 |
| chr4 | 140151690 | 140151702 | − | 12 | C-153 | 153 | 783 | 1413 |
| chr4 | 154743125 | 154743138 | + | 13 | C-154 | 154 | 784 | 1414 |
| chr4 | 155747961 | 155747979 | + | 18 | C-155 | 155 | 785 | 1415 |
| chr4 | 157076972 | 157076986 | − | 14 | C-156 | 156 | 786 | 1416 |
| chr4 | 160546263 | 160546275 | + | 12 | C-157 | 157 | 787 | 1417 |
| chr4 | 163858101 | 163858114 | − | 13 | C-158 | 158 | 788 | 1418 |
| chr4 | 173530413 | 173530425 | − | 12 | C-159 | 159 | 789 | 1419 |
| chr4 | 183256884 | 183256903 | + | 19 | C-160 | 160 | 790 | 1420 |
| chr4 | 184785606 | 184785621 | − | 15 | C-161 | 161 | 791 | 1421 |
| chr4 | 186892130 | 186892142 | − | 12 | C-162 | 162 | 792 | 1422 |
| chr5 | 89887 | 89899 | − | 12 | C-163 | 163 | 793 | 1423 |
| chr5 | 1752339 | 1752354 | − | 15 | C-164 | 164 | 794 | 1424 |
| chr5 | 1795802 | 1795815 | + | 13 | C-165 | 165 | 795 | 1425 |
| chr5 | 2609996 | 2610010 | − | 14 | C-166 | 166 | 796 | 1426 |
| chr5 | 14457373 | 14457387 | + | 14 | C-167 | 167 | 797 | 1427 |
| chr5 | 34840237 | 34840250 | − | 13 | C-168 | 168 | 798 | 1428 |
| chr5 | 41005413 | 41005425 | + | 12 | C-169 | 169 | 799 | 1429 |
| chr5 | 93960081 | 93960095 | + | 14 | C-170 | 170 | 800 | 1430 |
| chr5 | 97065048 | 97065061 | − | 13 | C-171 | 171 | 801 | 1431 |
| chr5 | 97182778 | 97182793 | − | 15 | C-172 | 172 | 802 | 1432 |
| chr5 | 120463788 | 120463800 | + | 12 | C-173 | 173 | 803 | 1433 |
| chr5 | 135216465 | 135216477 | + | 12 | C-174 | 174 | 804 | 1434 |
| chr5 | 136134037 | 136134053 | − | 16 | C-175 | 175 | 805 | 1435 |
| chr5 | 137079533 | 137079545 | + | 12 | C-176 | 176 | 806 | 1436 |
| chr5 | 138897294 | 138897308 | + | 14 | C-177 | 177 | 807 | 1437 |
| chr5 | 139637353 | 139637365 | + | 12 | C-178 | 178 | 808 | 1438 |
| chr5 | 140557095 | 140557108 | + | 13 | C-179 | 179 | 809 | 1439 |
| chr5 | 154191435 | 154191448 | + | 13 | C-180 | 180 | 810 | 1440 |
| chr5 | 158940763 | 158940779 | + | 16 | C-181 | 181 | 811 | 1441 |
| chr5 | 160133966 | 160133979 | + | 13 | C-182 | 182 | 812 | 1442 |
| chr5 | 168165648 | 168165664 | + | 16 | C-183 | 183 | 813 | 1443 |
| chr5 | 172189236 | 172189248 | − | 12 | C-184 | 184 | 814 | 1444 |
| chr5 | 174223802 | 174223814 | − | 12 | C-185 | 185 | 815 | 1445 |
| chr5 | 175116420 | 175116434 | − | 14 | C-186 | 186 | 816 | 1446 |
| chr5 | 176642851 | 176642865 | + | 14 | C-187 | 187 | 817 | 1447 |
| chr5 | 177300057 | 177300070 | + | 13 | C-188 | 188 | 818 | 1448 |
| chr5 | 177302735 | 177302747 | + | 12 | C-189 | 189 | 819 | 1449 |
| chr5 | 178246728 | 178246740 | − | 12 | C-190 | 190 | 820 | 1450 |
| chr5 | 178627217 | 178627230 | + | 13 | C-191 | 191 | 821 | 1451 |
| chr5 | 180101351 | 180101365 | − | 14 | C-192 | 192 | 822 | 1452 |
| chr6 | 1610015 | 1610029 | + | 14 | C-193 | 193 | 823 | 1453 |
| chr6 | 4674348 | 4674364 | − | 16 | C-194 | 194 | 824 | 1454 |
| chr6 | 6713579 | 6713592 | + | 13 | C-195 | 195 | 825 | 1455 |
| chr6 | 7106506 | 7106519 | − | 13 | C-196 | 196 | 826 | 1456 |
| chr6 | 10411046 | 10411058 | + | 12 | C-197 | 197 | 827 | 1457 |
| chr6 | 12291217 | 12291229 | + | 12 | C-198 | 198 | 828 | 1458 |
| chr6 | 12845429 | 12845443 | + | 14 | C-199 | 199 | 829 | 1459 |
| chr6 | 15304303 | 15304318 | + | 15 | C-200 | 200 | 830 | 1460 |
| chr6 | 17496027 | 17496039 | − | 12 | C-201 | 201 | 831 | 1461 |
| chr6 | 19794138 | 19794150 | + | 12 | C-202 | 202 | 832 | 1462 |
| chr6 | 23655986 | 23656001 | − | 15 | C-203 | 203 | 833 | 1463 |
| chr6 | 28988893 | 28988905 | − | 12 | C-204 | 204 | 834 | 1464 |
| chr6 | 35280516 | 35280529 | + | 13 | C-205 | 205 | 835 | 1465 |
| chr6 | 44072606 | 44072618 | + | 12 | C-206 | 206 | 836 | 1466 |
| chr6 | 47529183 | 47529200 | + | 17 | C-207 | 207 | 837 | 1467 |
| chr6 | 51804359 | 51804373 | − | 14 | C-208 | 208 | 838 | 1468 |
| chr6 | 53925134 | 53925148 | + | 14 | C-209 | 209 | 839 | 1469 |
| chr6 | 97282558 | 97282571 | − | 13 | C-210 | 210 | 840 | 1470 |
| chr6 | 101396242 | 101396254 | + | 12 | C-211 | 211 | 841 | 1471 |
| chr6 | 106716510 | 106716522 | + | 12 | C-212 | 212 | 842 | 1472 |
| chr6 | 109185922 | 109185935 | + | 13 | C-213 | 213 | 843 | 1473 |
| chr6 | 121888738 | 121888750 | + | 12 | C-214 | 214 | 844 | 1474 |
| chr6 | 136707557 | 136707569 | − | 12 | C-215 | 215 | 845 | 1475 |
| chr6 | 150612045 | 150612060 | + | 15 | C-216 | 216 | 846 | 1476 |
| chr6 | 163416054 | 163416068 | − | 14 | C-217 | 217 | 847 | 1477 |
| chr6 | 163963195 | 163963207 | − | 12 | C-218 | 218 | 848 | 1478 |
| chr6 | 165855305 | 165855319 | − | 14 | C-219 | 219 | 849 | 1479 |
| chr6 | 168274084 | 168274101 | − | 17 | C-220 | 220 | 850 | 1480 |
| chr7 | 516040 | 516052 | + | 12 | C-221 | 221 | 851 | 1481 |
| chr7 | 1413974 | 1413989 | + | 15 | C-222 | 222 | 852 | 1482 |
| chr7 | 1464760 | 1464773 | + | 13 | C-223 | 223 | 853 | 1483 |
| chr7 | 1814960 | 1814975 | − | 15 | C-224 | 224 | 854 | 1484 |
| chr7 | 2504914 | 2504932 | + | 18 | C-225 | 225 | 855 | 1485 |
| chr7 | 15097104 | 15097118 | + | 14 | C-226 | 226 | 856 | 1486 |
| chr7 | 19969968 | 19969983 | + | 15 | C-227 | 227 | 857 | 1487 |
| chr7 | 23202662 | 23202676 | + | 14 | C-228 | 228 | 858 | 1488 |
| chr7 | 23600374 | 23600387 | + | 13 | C-229 | 229 | 859 | 1489 |
| chr7 | 29293362 | 29293377 | + | 15 | C-230 | 230 | 860 | 1490 |
| chr7 | 30315727 | 30315740 | − | 13 | C-231 | 231 | 861 | 1491 |
| chr7 | 31098703 | 31098718 | − | 15 | C-232 | 232 | 862 | 1492 |
| chr7 | 32065051 | 32065064 | − | 13 | C-233 | 233 | 863 | 1493 |
| chr7 | 42210338 | 42210354 | + | 16 | C-234 | 234 | 864 | 1494 |
| chr7 | 55497554 | 55497570 | − | 16 | C-235 | 235 | 865 | 1495 |
| chr7 | 66628736 | 66628754 | + | 18 | C-236 | 236 | 866 | 1496 |
| chr7 | 73842642 | 73842656 | + | 14 | C-237 | 237 | 867 | 1497 |
| chr7 | 74372402 | 74372415 | − | 13 | C-238 | 238 | 868 | 1498 |
| chr7 | 76048981 | 76048998 | − | 17 | C-239 | 239 | 869 | 1499 |
| chr7 | 97004938 | 97004950 | + | 12 | C-240 | 240 | 870 | 1500 |
| chr7 | 106101438 | 106101467 | + | 29 | C-241 | 241 | 871 | 1501 |
| chr7 | 107563544 | 107563558 | − | 14 | C-242 | 242 | 872 | 1502 |
| chr7 | 112449826 | 112449840 | − | 14 | C-243 | 243 | 873 | 1503 |
| chr7 | 115477645 | 115477658 | − | 13 | C-244 | 244 | 874 | 1504 |
| chr7 | 121390853 | 121390872 | − | 19 | C-245 | 245 | 875 | 1505 |
| chr7 | 128834311 | 128834323 | + | 12 | C-246 | 246 | 876 | 1506 |
| chr7 | 135939576 | 135939588 | − | 12 | C-247 | 247 | 877 | 1507 |
| chr7 | 137381288 | 137381301 | + | 13 | C-248 | 248 | 878 | 1508 |
| chr7 | 139572764 | 139572781 | + | 17 | C-249 | 249 | 879 | 1509 |
| chr7 | 140260771 | 140260786 | + | 15 | C-250 | 250 | 880 | 1510 |
| chr7 | 151090236 | 151090248 | − | 12 | C-251 | 251 | 881 | 1511 |
| chr7 | 151210415 | 151210428 | − | 13 | C-252 | 252 | 882 | 1512 |
| chr7 | 155515294 | 155515308 | + | 14 | C-253 | 253 | 883 | 1513 |
| chr7 | 155815114 | 155815127 | + | 13 | C-254 | 254 | 884 | 1514 |
| chr7 | 157691067 | 157691081 | + | 14 | C-255 | 255 | 885 | 1515 |
| chr8 | 4201887 | 4201899 | − | 12 | C-256 | 256 | 886 | 1516 |
| chr8 | 10251861 | 10251873 | − | 12 | C-257 | 257 | 887 | 1517 |
| chr8 | 11268650 | 11268662 | − | 12 | C-258 | 258 | 888 | 1518 |
| chr8 | 11681492 | 11681508 | − | 16 | C-259 | 259 | 889 | 1519 |
| chr8 | 22049569 | 22049581 | + | 12 | C-260 | 260 | 890 | 1520 |
| chr8 | 23856296 | 23856309 | − | 13 | C-261 | 261 | 891 | 1521 |
| chr8 | 34075801 | 34075814 | − | 13 | C-262 | 262 | 892 | 1522 |
| chr8 | 38940650 | 38940662 | − | 12 | C-263 | 263 | 893 | 1523 |
| chr8 | 60714406 | 60714427 | + | 21 | C-264 | 264 | 894 | 1524 |
| chr8 | 67041122 | 67041134 | − | 12 | C-265 | 265 | 895 | 1525 |
| chr8 | 73627208 | 73627222 | − | 14 | C-266 | 266 | 896 | 1526 |
| chr8 | 81499569 | 81499581 | − | 12 | C-267 | 267 | 897 | 1527 |
| chr8 | 93916690 | 93916703 | − | 13 | C-268 | 268 | 898 | 1528 |
| chr8 | 100920795 | 100920808 | − | 13 | C-269 | 269 | 899 | 1529 |
| chr8 | 101109125 | 101109138 | + | 13 | C-270 | 270 | 900 | 1530 |
| chr8 | 101870897 | 101870909 | + | 12 | C-271 | 271 | 901 | 1531 |
| chr8 | 117015536 | 117015548 | + | 12 | C-272 | 272 | 902 | 1532 |
| chr8 | 122955069 | 122955082 | − | 13 | C-273 | 273 | 903 | 1533 |
| chr8 | 124611106 | 124611118 | + | 12 | C-274 | 274 | 904 | 1534 |
| chr8 | 127383955 | 127383967 | + | 12 | C-275 | 275 | 905 | 1535 |
| chr8 | 132070011 | 132070024 | − | 13 | C-276 | 276 | 906 | 1536 |
| chr8 | 133396203 | 133396218 | + | 15 | C-277 | 277 | 907 | 1537 |
| chr8 | 143189991 | 143190003 | − | 12 | C-278 | 278 | 908 | 1538 |
| chr8 | 143541824 | 143541837 | − | 13 | C-279 | 279 | 909 | 1539 |
| chr8 | 144513198 | 144513210 | − | 12 | C-280 | 280 | 910 | 1540 |
| chr9 | 2711382 | 2711394 | − | 12 | C-281 | 281 | 911 | 1541 |
| chr9 | 3962946 | 3962959 | − | 13 | C-282 | 282 | 912 | 1542 |
| chr9 | 4007897 | 4007909 | − | 12 | C-283 | 283 | 913 | 1543 |
| chr9 | 7568907 | 7568921 | + | 14 | C-284 | 284 | 914 | 1544 |
| chr9 | 16304806 | 16304818 | − | 12 | C-285 | 285 | 915 | 1545 |
| chr9 | 16847401 | 16847414 | − | 13 | C-286 | 286 | 916 | 1546 |
| chr9 | 18681697 | 18681709 | − | 12 | C-287 | 287 | 917 | 1547 |
| chr9 | 20263861 | 20263874 | + | 13 | C-288 | 288 | 918 | 1548 |
| chr9 | 33024861 | 33024877 | − | 16 | C-289 | 289 | 919 | 1549 |
| chr9 | 33935163 | 33935175 | − | 12 | C-290 | 290 | 920 | 1550 |
| chr9 | 38227059 | 38227074 | − | 15 | C-291 | 291 | 921 | 1551 |
| chr9 | 70629215 | 70629229 | − | 14 | C-292 | 292 | 922 | 1552 |
| chr9 | 91713941 | 91713954 | + | 13 | C-293 | 293 | 923 | 1553 |
| chr9 | 95569875 | 95569890 | + | 15 | C-294 | 294 | 924 | 1554 |
| chr9 | 97851939 | 97851951 | + | 12 | C-295 | 295 | 925 | 1555 |
| chr9 | 109120153 | 109120168 | − | 15 | C-296 | 296 | 926 | 1556 |
| chr9 | 109391870 | 109391883 | − | 13 | C-297 | 297 | 927 | 1557 |
| chr9 | 113883982 | 113884002 | + | 20 | C-298 | 298 | 928 | 1558 |
| chr9 | 126124205 | 126124220 | + | 15 | C-299 | 299 | 929 | 1559 |
| chr9 | 129889081 | 129889093 | − | 12 | C-300 | 300 | 930 | 1560 |
| chr9 | 131838409 | 131838421 | − | 12 | C-301 | 301 | 931 | 1561 |
| chr9 | 132481959 | 132481973 | − | 14 | C-302 | 302 | 932 | 1562 |
| chr9 | 134752419 | 134752431 | − | 12 | C-303 | 303 | 933 | 1563 |
| chr9 | 136131338 | 136131350 | − | 12 | C-304 | 304 | 934 | 1564 |
| chr9 | 138022805 | 138022817 | − | 12 | C-305 | 305 | 935 | 1565 |
| chr10 | 593485 | 593498 | + | 13 | C-306 | 306 | 936 | 1566 |
| chr10 | 3079662 | 3079674 | − | 12 | C-307 | 307 | 937 | 1567 |
| chr10 | 6200659 | 6200675 | − | 16 | C-308 | 308 | 938 | 1568 |
| chr10 | 7873617 | 7873629 | + | 12 | C-309 | 309 | 939 | 1569 |
| chr10 | 8052897 | 8052909 | − | 12 | C-310 | 310 | 940 | 1570 |
| chr10 | 11009005 | 11009019 | − | 14 | C-311 | 311 | 941 | 1571 |
| chr10 | 13689198 | 13689220 | − | 22 | C-312 | 312 | 942 | 1572 |
| chr10 | 21524591 | 21524606 | − | 15 | C-313 | 313 | 943 | 1573 |
| chr10 | 21751884 | 21751901 | − | 17 | C-314 | 314 | 944 | 1574 |
| chr10 | 48656265 | 48656278 | − | 13 | C-315 | 315 | 945 | 1575 |
| chr10 | 62981028 | 62981040 | − | 12 | C-316 | 316 | 946 | 1576 |
| chr10 | 72216480 | 72216495 | + | 15 | C-317 | 317 | 947 | 1577 |
| chr10 | 79067986 | 79067998 | − | 12 | C-318 | 318 | 948 | 1578 |
| chr10 | 96374961 | 96374977 | − | 16 | C-319 | 319 | 949 | 1579 |
| chr10 | 101844024 | 101844036 | − | 12 | C-320 | 320 | 950 | 1580 |
| chr10 | 102395101 | 102395118 | − | 17 | C-321 | 321 | 951 | 1581 |
| chr10 | 110208740 | 110208753 | + | 13 | C-322 | 322 | 952 | 1582 |
| chr10 | 123420681 | 123420694 | − | 13 | C-323 | 323 | 953 | 1583 |
| chr10 | 123576372 | 123576384 | − | 12 | C-324 | 324 | 954 | 1584 |
| chr10 | 124021236 | 124021248 | − | 12 | C-325 | 325 | 955 | 1585 |
| chr10 | 124727330 | 124727344 | − | 14 | C-326 | 326 | 956 | 1586 |
| chr10 | 125041504 | 125041518 | + | 14 | C-327 | 327 | 957 | 1587 |
| chr10 | 125161067 | 125161079 | − | 12 | C-328 | 328 | 958 | 1588 |
| chr10 | 126387889 | 126387901 | − | 12 | C-329 | 329 | 959 | 1589 |
| chr10 | 128993122 | 128993134 | + | 12 | C-330 | 330 | 960 | 1590 |
| chr10 | 129887054 | 129887067 | − | 13 | C-331 | 331 | 961 | 1591 |
| chr10 | 130786517 | 130786529 | + | 12 | C-332 | 332 | 962 | 1592 |
| chr10 | 132628463 | 132628478 | − | 15 | C-333 | 333 | 963 | 1593 |
| chr10 | 133277724 | 133277736 | − | 12 | C-334 | 334 | 964 | 1594 |
| chr11 | 1548766 | 1548778 | − | 12 | C-335 | 335 | 965 | 1595 |
| chr11 | 2138388 | 2138400 | − | 12 | C-336 | 336 | 966 | 1596 |
| chr11 | 11178731 | 11178744 | − | 13 | C-337 | 337 | 967 | 1597 |
| chr11 | 19831223 | 19831237 | − | 14 | C-338 | 338 | 968 | 1598 |
| chr11 | 27393939 | 27393954 | − | 15 | C-339 | 339 | 969 | 1599 |
| chr11 | 34182497 | 34182509 | − | 12 | C-340 | 340 | 970 | 1600 |
| chr11 | 45649450 | 45649464 | − | 14 | C-341 | 341 | 971 | 1601 |
| chr11 | 46382790 | 46382805 | + | 15 | C-342 | 342 | 972 | 1602 |
| chr11 | 46617540 | 46617552 | + | 12 | C-343 | 343 | 973 | 1603 |
| chr11 | 47400411 | 47400423 | − | 12 | C-344 | 344 | 974 | 1604 |
| chr11 | 57566947 | 57566959 | + | 12 | C-345 | 345 | 975 | 1605 |
| chr11 | 63938956 | 63938970 | − | 14 | C-346 | 346 | 976 | 1606 |
| chr11 | 64915132 | 64915144 | + | 12 | C-347 | 347 | 977 | 1607 |
| chr11 | 67415545 | 67415560 | − | 15 | C-348 | 348 | 978 | 1608 |
| chr11 | 72080266 | 72080280 | + | 14 | C-349 | 349 | 979 | 1609 |
| chr11 | 76784746 | 76784759 | − | 13 | C-350 | 350 | 980 | 1610 |
| chr11 | 93850670 | 93850683 | − | 13 | C-351 | 351 | 981 | 1611 |
| chr11 | 103051501 | 103051514 | + | 13 | C-352 | 352 | 982 | 1612 |
| chr11 | 103486639 | 103486651 | + | 12 | C-353 | 353 | 983 | 1613 |
| chr11 | 106997617 | 106997629 | + | 12 | C-354 | 354 | 984 | 1614 |
| chr11 | 112882103 | 112882115 | + | 12 | C-355 | 355 | 985 | 1615 |
| chr11 | 118972129 | 118972141 | + | 12 | C-356 | 356 | 986 | 1616 |
| chr11 | 121660406 | 121660418 | − | 12 | C-357 | 357 | 987 | 1617 |
| chr11 | 126929948 | 126929961 | + | 13 | C-358 | 358 | 988 | 1618 |
| chr11 | 128403216 | 128403230 | + | 14 | C-359 | 359 | 989 | 1619 |
| chr11 | 132347216 | 132347231 | + | 15 | C-360 | 360 | 990 | 1620 |
| chr11 | 134053142 | 134053155 | − | 13 | C-361 | 361 | 991 | 1621 |
| chr12 | 389101 | 389116 | − | 15 | C-362 | 362 | 992 | 1622 |
| chr12 | 568876 | 568889 | + | 13 | C-363 | 363 | 993 | 1623 |
| chr12 | 3247299 | 3247312 | + | 13 | C-364 | 364 | 994 | 1624 |
| chr12 | 3629848 | 3629860 | − | 12 | C-365 | 365 | 995 | 1625 |
| chr12 | 6960259 | 6960273 | − | 14 | C-366 | 366 | 996 | 1626 |
| chr12 | 7074066 | 7074078 | + | 12 | C-367 | 367 | 997 | 1627 |
| chr12 | 11689809 | 11689822 | + | 13 | C-368 | 368 | 998 | 1628 |
| chr12 | 13508327 | 13508339 | + | 12 | C-369 | 369 | 999 | 1629 |
| chr12 | 13736135 | 13736150 | − | 15 | C-370 | 370 | 1000 | 1630 |
| chr12 | 16605436 | 16605448 | + | 12 | C-371 | 371 | 1001 | 1631 |
| chr12 | 17831657 | 17831669 | + | 12 | C-372 | 372 | 1002 | 1632 |
| chr12 | 45407482 | 45407499 | + | 17 | C-373 | 373 | 1003 | 1633 |
| chr12 | 54026964 | 54026976 | − | 12 | C-374 | 374 | 1004 | 1634 |
| chr12 | 57136395 | 57136407 | + | 12 | C-375 | 375 | 1005 | 1635 |
| chr12 | 64675045 | 64675059 | + | 14 | C-376 | 376 | 1006 | 1636 |
| chr12 | 67068853 | 67068868 | + | 15 | C-377 | 377 | 1007 | 1637 |
| chr12 | 70576669 | 70576682 | − | 13 | C-378 | 378 | 1008 | 1638 |
| chr12 | 113830575 | 113830589 | − | 14 | C-379 | 379 | 1009 | 1639 |
| chr12 | 114766226 | 114766238 | + | 12 | C-380 | 380 | 1010 | 1640 |
| chr12 | 115968053 | 115968067 | + | 14 | C-381 | 381 | 1011 | 1641 |
| chr12 | 118981102 | 118981118 | + | 16 | C-382 | 382 | 1012 | 1642 |
| chr12 | 119019949 | 119019961 | + | 12 | C-383 | 383 | 1013 | 1643 |
| chr12 | 121299642 | 121299656 | + | 14 | C-384 | 384 | 1014 | 1644 |
| chr12 | 121799717 | 121799730 | − | 13 | C-385 | 385 | 1015 | 1645 |
| chr12 | 122969174 | 122969190 | + | 16 | C-386 | 386 | 1016 | 1646 |
| chr12 | 123532703 | 123532716 | − | 13 | C-387 | 387 | 1017 | 1647 |
| chr12 | 128266299 | 128266314 | − | 15 | C-388 | 388 | 1018 | 1648 |
| chr12 | 129029992 | 129030004 | + | 12 | C-389 | 389 | 1019 | 1649 |
| chr12 | 130312843 | 130312855 | + | 12 | C-390 | 390 | 1020 | 1650 |
| chr12 | 131827353 | 131827372 | − | 19 | C-391 | 391 | 1021 | 1651 |
| chr12 | 132181879 | 132181896 | + | 17 | C-392 | 392 | 1022 | 1652 |
| chr13 | 20229792 | 20229804 | + | 12 | C-393 | 393 | 1023 | 1653 |
| chr13 | 20720874 | 20720886 | + | 12 | C-394 | 394 | 1024 | 1654 |
| chr13 | 29360688 | 29360701 | + | 13 | C-395 | 395 | 1025 | 1655 |
| chr13 | 29544867 | 29544879 | − | 12 | C-396 | 396 | 1026 | 1656 |
| chr13 | 51767781 | 51767797 | − | 16 | C-397 | 397 | 1027 | 1657 |
| chr13 | 67140025 | 67140038 | + | 13 | C-398 | 398 | 1028 | 1658 |
| chr13 | 99347319 | 99347334 | + | 15 | C-399 | 399 | 1029 | 1659 |
| chr13 | 99894736 | 99894751 | − | 15 | C-400 | 400 | 1030 | 1660 |
| chr13 | 102140043 | 102140056 | + | 13 | C-401 | 401 | 1031 | 1661 |
| chr13 | 106386906 | 106386918 | − | 12 | C-402 | 402 | 1032 | 1662 |
| chr13 | 109818506 | 109818520 | − | 14 | C-403 | 403 | 1033 | 1663 |
| chr14 | 23120510 | 23120524 | − | 14 | C-404 | 404 | 1034 | 1664 |
| chr14 | 23487410 | 23487425 | − | 15 | C-405 | 405 | 1035 | 1665 |
| chr14 | 24232392 | 24232409 | + | 17 | C-406 | 406 | 1036 | 1666 |
| chr14 | 27137293 | 27137305 | − | 12 | C-407 | 407 | 1037 | 1667 |
| chr14 | 36520440 | 36520454 | + | 14 | C-408 | 408 | 1038 | 1668 |
| chr14 | 36658373 | 36658385 | − | 12 | C-409 | 409 | 1039 | 1669 |
| chr14 | 39395898 | 39395919 | − | 21 | C-410 | 410 | 1040 | 1670 |
| chr14 | 57865058 | 57865070 | + | 12 | C-411 | 411 | 1041 | 1671 |
| chr14 | 59869579 | 59869592 | − | 13 | C-412 | 412 | 1042 | 1672 |
| chr14 | 68755902 | 68755915 | + | 13 | C-413 | 413 | 1043 | 1673 |
| chr14 | 72859469 | 72859483 | + | 14 | C-414 | 414 | 1044 | 1674 |
| chr14 | 76864410 | 76864423 | − | 13 | C-415 | 415 | 1045 | 1675 |
| chr14 | 78248302 | 78248316 | + | 14 | C-416 | 416 | 1046 | 1676 |
| chr14 | 80187573 | 80187585 | − | 12 | C-417 | 417 | 1047 | 1677 |
| chr14 | 85511227 | 85511246 | − | 19 | C-418 | 418 | 1048 | 1678 |
| chr14 | 90398112 | 90398124 | − | 12 | C-419 | 419 | 1049 | 1679 |
| chr14 | 96740385 | 96740397 | + | 12 | C-420 | 420 | 1050 | 1680 |
| chr14 | 99042773 | 99042786 | + | 13 | C-421 | 421 | 1051 | 1681 |
| chr14 | 99420947 | 99420976 | − | 29 | C-422 | 422 | 1052 | 1682 |
| chr14 | 100147658 | 100147670 | + | 12 | C-423 | 423 | 1053 | 1683 |
| chr14 | 104677155 | 104677168 | − | 13 | C-424 | 424 | 1054 | 1684 |
| chr14 | 104730958 | 104730974 | − | 16 | C-425 | 425 | 1055 | 1685 |
| chr15 | 25656044 | 25656057 | − | 13 | C-426 | 426 | 1056 | 1686 |
| chr15 | 25939040 | 25939052 | + | 12 | C-427 | 427 | 1057 | 1687 |
| chr15 | 32804437 | 32804455 | − | 18 | C-428 | 428 | 1058 | 1688 |
| chr15 | 34721935 | 34721947 | + | 12 | C-429 | 429 | 1059 | 1689 |
| chr15 | 42401473 | 42401487 | + | 14 | C-430 | 430 | 1060 | 1690 |
| chr15 | 42411688 | 42411702 | − | 14 | C-431 | 431 | 1061 | 1691 |
| chr15 | 43509188 | 43509202 | − | 14 | C-432 | 432 | 1062 | 1692 |
| chr15 | 53758768 | 53758782 | − | 14 | C-433 | 433 | 1063 | 1693 |
| chr15 | 56465592 | 56465608 | + | 16 | C-434 | 434 | 1064 | 1694 |
| chr15 | 60540564 | 60540576 | + | 12 | C-435 | 435 | 1065 | 1695 |
| chr15 | 60876311 | 60876326 | − | 15 | C-436 | 436 | 1066 | 1696 |
| chr15 | 61119081 | 61119093 | − | 12 | C-437 | 437 | 1067 | 1697 |
| chr15 | 63270521 | 63270534 | − | 13 | C-438 | 438 | 1068 | 1698 |
| chr15 | 64743640 | 64743652 | − | 12 | C-439 | 439 | 1069 | 1699 |
| chr15 | 70289187 | 70289200 | + | 13 | C-440 | 440 | 1070 | 1700 |
| chr15 | 74873426 | 74873446 | + | 20 | C-441 | 441 | 1071 | 1701 |
| chr15 | 75451336 | 75451348 | + | 12 | C-442 | 442 | 1072 | 1702 |
| chr15 | 76954484 | 76954496 | − | 12 | C-443 | 443 | 1073 | 1703 |
| chr15 | 77020868 | 77020880 | − | 12 | C-444 | 444 | 1074 | 1704 |
| chr15 | 77072857 | 77072871 | + | 14 | C-445 | 445 | 1075 | 1705 |
| chr15 | 79086575 | 79086587 | + | 12 | C-446 | 446 | 1076 | 1706 |
| chr15 | 79091164 | 79091176 | + | 12 | C-447 | 447 | 1077 | 1707 |
| chr15 | 82132681 | 82132696 | − | 15 | C-448 | 448 | 1078 | 1708 |
| chr15 | 83435231 | 83435243 | − | 12 | C-449 | 449 | 1079 | 1709 |
| chr15 | 89221922 | 89221935 | + | 13 | C-450 | 450 | 1080 | 1710 |
| chr15 | 94579662 | 94579676 | − | 14 | C-451 | 451 | 1081 | 1711 |
| chr15 | 98971194 | 98971210 | − | 16 | C-452 | 452 | 1082 | 1712 |
| chr16 | 536003 | 536018 | + | 15 | C-453 | 453 | 1083 | 1713 |
| chr16 | 1271308 | 1271325 | − | 17 | C-454 | 454 | 1084 | 1714 |
| chr16 | 2087485 | 2087498 | − | 13 | C-455 | 455 | 1085 | 1715 |
| chr16 | 7718246 | 7718258 | − | 12 | C-456 | 456 | 1086 | 1716 |
| chr16 | 14355428 | 14355440 | − | 12 | C-457 | 457 | 1087 | 1717 |
| chr16 | 19590139 | 19590156 | + | 17 | C-458 | 458 | 1088 | 1718 |
| chr16 | 28973784 | 28973800 | − | 16 | C-459 | 459 | 1089 | 1719 |
| chr16 | 50562986 | 50562998 | + | 12 | C-460 | 460 | 1090 | 1720 |
| chr16 | 50858961 | 50858974 | + | 13 | C-461 | 461 | 1091 | 1721 |
| chr16 | 55479978 | 55479990 | − | 12 | C-462 | 462 | 1092 | 1722 |
| chr16 | 56945865 | 56945877 | + | 12 | C-463 | 463 | 1093 | 1723 |
| chr16 | 66021101 | 66021113 | + | 12 | C-464 | 464 | 1094 | 1724 |
| chr16 | 68085195 | 68085212 | − | 17 | C-465 | 465 | 1095 | 1725 |
| chr16 | 71467960 | 71467977 | − | 17 | C-466 | 466 | 1096 | 1726 |
| chr16 | 78513894 | 78513906 | + | 12 | C-467 | 467 | 1097 | 1727 |
| chr16 | 78594429 | 78594445 | + | 16 | C-468 | 468 | 1098 | 1728 |
| chr16 | 79587869 | 79587881 | − | 12 | C-469 | 469 | 1099 | 1729 |
| chr16 | 82700955 | 82700974 | + | 19 | C-470 | 470 | 1100 | 1730 |
| chr16 | 83027102 | 83027114 | + | 12 | C-471 | 471 | 1101 | 1731 |
| chr16 | 83131182 | 83131201 | + | 19 | C-472 | 472 | 1102 | 1732 |
| chr16 | 85253069 | 85253082 | + | 13 | C-473 | 473 | 1103 | 1733 |
| chr16 | 85312204 | 85312217 | − | 13 | C-474 | 474 | 1104 | 1734 |
| chr16 | 85617596 | 85617611 | + | 15 | C-475 | 475 | 1105 | 1735 |
| chr16 | 87562248 | 87562263 | + | 15 | C-476 | 476 | 1106 | 1736 |
| chr16 | 87819632 | 87819646 | − | 14 | C-477 | 477 | 1107 | 1737 |
| chr16 | 88748488 | 88748501 | + | 13 | C-478 | 478 | 1108 | 1738 |
| chr16 | 89973740 | 89973753 | + | 13 | C-479 | 479 | 1109 | 1739 |
| chr17 | 3037364 | 3037377 | + | 13 | C-480 | 480 | 1110 | 1740 |
| chr17 | 6451873 | 6451885 | + | 12 | C-481 | 481 | 1111 | 1741 |
| chr17 | 7238285 | 7238298 | + | 13 | C-482 | 482 | 1112 | 1742 |
| chr17 | 13786626 | 13786639 | − | 13 | C-483 | 483 | 1113 | 1743 |
| chr17 | 18244722 | 18244734 | − | 12 | C-484 | 484 | 1114 | 1744 |
| chr17 | 19340033 | 19340048 | + | 15 | C-485 | 485 | 1115 | 1745 |
| chr17 | 28813022 | 28813041 | − | 19 | C-486 | 486 | 1116 | 1746 |
| chr17 | 31536037 | 31536049 | − | 12 | C-487 | 487 | 1117 | 1747 |
| chr17 | 34623401 | 34623416 | + | 15 | C-488 | 488 | 1118 | 1748 |
| chr17 | 37094572 | 37094585 | + | 13 | C-489 | 489 | 1119 | 1749 |
| chr17 | 38564354 | 38564366 | + | 12 | C-490 | 490 | 1120 | 1750 |
| chr17 | 41499339 | 41499352 | + | 13 | C-491 | 491 | 1121 | 1751 |
| chr17 | 43021606 | 43021624 | − | 18 | C-492 | 492 | 1122 | 1752 |
| chr17 | 43025792 | 43025811 | − | 19 | C-493 | 493 | 1123 | 1753 |
| chr17 | 44314674 | 44314688 | − | 14 | C-494 | 494 | 1124 | 1754 |
| chr17 | 46152582 | 46152594 | − | 12 | C-495 | 495 | 1125 | 1755 |
| chr17 | 47780827 | 47780839 | − | 12 | C-496 | 496 | 1126 | 1756 |
| chr17 | 57682317 | 57682329 | + | 12 | C-497 | 497 | 1127 | 1757 |
| chr17 | 58692125 | 58692137 | − | 12 | C-498 | 498 | 1128 | 1758 |
| chr17 | 60136692 | 60136708 | + | 16 | C-499 | 499 | 1129 | 1759 |
| chr17 | 63704620 | 63704632 | − | 12 | C-500 | 500 | 1130 | 1760 |
| chr17 | 65304579 | 65304596 | + | 17 | C-501 | 501 | 1131 | 1761 |
| chr17 | 66992160 | 66992172 | − | 12 | C-502 | 502 | 1132 | 1762 |
| chr17 | 67572468 | 67572480 | − | 12 | C-503 | 503 | 1133 | 1763 |
| chr17 | 72119644 | 72119658 | − | 14 | C-504 | 504 | 1134 | 1764 |
| chr17 | 73466715 | 73466727 | + | 12 | C-505 | 505 | 1135 | 1765 |
| chr17 | 74840426 | 74840445 | + | 19 | C-506 | 506 | 1136 | 1766 |
| chr17 | 75630841 | 75630853 | − | 12 | C-507 | 507 | 1137 | 1767 |
| chr17 | 75784994 | 75785007 | + | 13 | C-508 | 508 | 1138 | 1768 |
| chr17 | 75920830 | 75920844 | − | 14 | C-509 | 509 | 1139 | 1769 |
| chr17 | 76077966 | 76077980 | − | 14 | C-510 | 510 | 1140 | 1770 |
| chr17 | 76470307 | 76470319 | − | 12 | C-511 | 511 | 1141 | 1771 |
| chr17 | 78039309 | 78039321 | + | 12 | C-512 | 512 | 1142 | 1772 |
| chr17 | 80396734 | 80396746 | + | 12 | C-513 | 513 | 1143 | 1773 |
| chr17 | 81923262 | 81923275 | + | 13 | C-514 | 514 | 1144 | 1774 |
| chr17 | 82092678 | 82092690 | − | 12 | C-515 | 515 | 1145 | 1775 |
| chr17 | 82242212 | 82242224 | − | 12 | C-516 | 516 | 1146 | 1776 |
| chr18 | 8540546 | 8540558 | − | 12 | C-517 | 517 | 1147 | 1777 |
| chr18 | 10475793 | 10475805 | − | 12 | C-518 | 518 | 1148 | 1778 |
| chr18 | 22087515 | 22087527 | − | 12 | C-519 | 519 | 1149 | 1779 |
| chr18 | 26862996 | 26863008 | − | 12 | C-520 | 520 | 1150 | 1780 |
| chr18 | 26863994 | 26864006 | − | 12 | C-521 | 521 | 1151 | 1781 |
| chr18 | 37318630 | 37318642 | + | 12 | C-522 | 522 | 1152 | 1782 |
| chr18 | 38709831 | 38709844 | + | 13 | C-523 | 523 | 1153 | 1783 |
| chr18 | 47520369 | 47520383 | + | 14 | C-524 | 524 | 1154 | 1784 |
| chr18 | 48947892 | 48947904 | + | 12 | C-525 | 525 | 1155 | 1785 |
| chr18 | 59267631 | 59267645 | + | 14 | C-526 | 526 | 1156 | 1786 |
| chr18 | 71130833 | 71130847 | + | 14 | C-527 | 527 | 1157 | 1787 |
| chr18 | 77271246 | 77271259 | + | 13 | C-528 | 528 | 1158 | 1788 |
| chr18 | 79642295 | 79642307 | + | 12 | C-529 | 529 | 1159 | 1789 |
| chr19 | 461586 | 461598 | − | 12 | C-530 | 530 | 1160 | 1790 |
| chr19 | 1605502 | 1605514 | − | 12 | C-531 | 531 | 1161 | 1791 |
| chr19 | 1610924 | 1610938 | − | 14 | C-532 | 532 | 1162 | 1792 |
| chr19 | 1648817 | 1648831 | − | 14 | C-533 | 533 | 1163 | 1793 |
| chr19 | 2188480 | 2188494 | + | 14 | C-534 | 534 | 1164 | 1794 |
| chr19 | 3061886 | 3061898 | − | 12 | C-535 | 535 | 1165 | 1795 |
| chr19 | 3722856 | 3722868 | − | 12 | C-536 | 536 | 1166 | 1796 |
| chr19 | 7679189 | 7679201 | + | 12 | C-537 | 537 | 1167 | 1797 |
| chr19 | 10419226 | 10419238 | − | 12 | C-538 | 538 | 1168 | 1798 |
| chr19 | 10457431 | 10457446 | − | 15 | C-539 | 539 | 1169 | 1799 |
| chr19 | 11192783 | 11192795 | + | 12 | C-540 | 540 | 1170 | 1800 |
| chr19 | 12944548 | 12944562 | − | 14 | C-541 | 541 | 1171 | 1801 |
| chr19 | 13018335 | 13018351 | − | 16 | C-542 | 542 | 1172 | 1802 |
| chr19 | 13226253 | 13226270 | − | 17 | C-543 | 543 | 1173 | 1803 |
| chr19 | 15251438 | 15251455 | − | 17 | C-544 | 544 | 1174 | 1804 |
| chr19 | 16873522 | 16873534 | + | 12 | C-545 | 545 | 1175 | 1805 |
| chr19 | 17686298 | 17686317 | + | 19 | C-546 | 546 | 1176 | 1806 |
| chr19 | 19213505 | 19213518 | − | 13 | C-547 | 547 | 1177 | 1807 |
| chr19 | 19277251 | 19277263 | − | 12 | C-548 | 548 | 1178 | 1808 |
| chr19 | 29269931 | 29269944 | + | 13 | C-549 | 549 | 1179 | 1809 |
| chr19 | 31959883 | 31959895 | − | 12 | C-550 | 550 | 1180 | 1810 |
| chr19 | 35030227 | 35030240 | − | 13 | C-551 | 551 | 1181 | 1811 |
| chr19 | 35900074 | 35900092 | + | 18 | C-552 | 552 | 1182 | 1812 |
| chr19 | 41253726 | 41253738 | + | 12 | C-553 | 553 | 1183 | 1813 |
| chr19 | 42370843 | 42370872 | − | 29 | C-554 | 554 | 1184 | 1814 |
| chr19 | 44749284 | 44749297 | − | 13 | C-555 | 555 | 1185 | 1815 |
| chr19 | 44753828 | 44753840 | − | 12 | C-556 | 556 | 1186 | 1816 |
| chr19 | 44759707 | 44759719 | + | 12 | C-557 | 557 | 1187 | 1817 |
| chr19 | 45450887 | 45450905 | + | 18 | C-558 | 558 | 1188 | 1818 |
| chr19 | 46408386 | 46408399 | + | 13 | C-559 | 559 | 1189 | 1819 |
| chr19 | 47020894 | 47020907 | + | 13 | C-560 | 560 | 1190 | 1820 |
| chr19 | 47531232 | 47531249 | − | 17 | C-561 | 561 | 1191 | 1821 |
| chr19 | 48638374 | 48638387 | − | 13 | C-562 | 562 | 1192 | 1822 |
| chr19 | 50427858 | 50427873 | + | 15 | C-563 | 563 | 1193 | 1823 |
| chr19 | 53962869 | 53962882 | − | 13 | C-564 | 564 | 1194 | 1824 |
| chr20 | 4721439 | 4721451 | + | 12 | C-565 | 565 | 1195 | 1825 |
| chr20 | 13280391 | 13280403 | + | 12 | C-566 | 566 | 1196 | 1826 |
| chr20 | 17990410 | 17990423 | − | 13 | C-567 | 567 | 1197 | 1827 |
| chr20 | 20021038 | 20021052 | − | 14 | C-568 | 568 | 1198 | 1828 |
| chr20 | 23421267 | 23421279 | + | 12 | C-569 | 569 | 1199 | 1829 |
| chr20 | 25390477 | 25390493 | + | 16 | C-570 | 570 | 1200 | 1830 |
| chr20 | 25696087 | 25696101 | + | 14 | C-571 | 571 | 1201 | 1831 |
| chr20 | 32536799 | 32536812 | − | 13 | C-572 | 572 | 1202 | 1832 |
| chr20 | 35398753 | 35398769 | − | 16 | C-573 | 573 | 1203 | 1833 |
| chr20 | 36269213 | 36269225 | − | 12 | C-574 | 574 | 1204 | 1834 |
| chr20 | 36744967 | 36744980 | − | 13 | C-575 | 575 | 1205 | 1835 |
| chr20 | 43188749 | 43188762 | − | 13 | C-576 | 576 | 1206 | 1836 |
| chr20 | 44434518 | 44434531 | − | 13 | C-577 | 577 | 1207 | 1837 |
| chr20 | 47057510 | 47057522 | + | 12 | C-578 | 578 | 1208 | 1838 |
| chr20 | 50155810 | 50155823 | − | 13 | C-579 | 579 | 1209 | 1839 |
| chr20 | 59867105 | 59867119 | − | 14 | C-580 | 580 | 1210 | 1840 |
| chr20 | 60589570 | 60589585 | − | 15 | C-581 | 581 | 1211 | 1841 |
| chr20 | 61797083 | 61797096 | + | 13 | C-582 | 582 | 1212 | 1842 |
| chr20 | 63274311 | 63274328 | + | 17 | C-583 | 583 | 1213 | 1843 |
| chr20 | 63774055 | 63774072 | + | 17 | C-584 | 584 | 1214 | 1844 |
| chr20 | 63940064 | 63940076 | − | 12 | C-585 | 585 | 1215 | 1845 |
| chr21 | 15733131 | 15733148 | + | 17 | C-586 | 586 | 1216 | 1846 |
| chr21 | 15775739 | 15775754 | + | 15 | C-587 | 587 | 1217 | 1847 |
| chr21 | 16071569 | 16071586 | + | 17 | C-588 | 588 | 1218 | 1848 |
| chr21 | 16373689 | 16373701 | − | 12 | C-589 | 589 | 1219 | 1849 |
| chr21 | 30322402 | 30322415 | − | 13 | C-590 | 590 | 1220 | 1850 |
| chr21 | 37476818 | 37476830 | + | 12 | C-591 | 591 | 1221 | 1851 |
| chr21 | 39349262 | 39349278 | + | 16 | C-592 | 592 | 1222 | 1852 |
| chr21 | 42405983 | 42405997 | − | 14 | C-593 | 593 | 1223 | 1853 |
| chr21 | 44538422 | 44538436 | + | 14 | C-594 | 594 | 1224 | 1854 |
| chr21 | 45750395 | 45750411 | + | 16 | C-595 | 595 | 1225 | 1855 |
| chr21 | 46436470 | 46436488 | + | 18 | C-596 | 596 | 1226 | 1856 |
| chr22 | 17159286 | 17159298 | + | 12 | C-597 | 597 | 1227 | 1857 |
| chr22 | 20111706 | 20111722 | + | 16 | C-598 | 598 | 1228 | 1858 |
| chr22 | 20971966 | 20971978 | − | 12 | C-599 | 599 | 1229 | 1859 |
| chr22 | 24425337 | 24425351 | + | 14 | C-600 | 600 | 1230 | 1860 |
| chr22 | 31291469 | 31291481 | + | 12 | C-601 | 601 | 1231 | 1861 |
| chr22 | 36348841 | 36348853 | + | 12 | C-602 | 602 | 1232 | 1862 |
| chr22 | 37641098 | 37641111 | + | 13 | C-603 | 603 | 1233 | 1863 |
| chr22 | 40819412 | 40819425 | − | 13 | C-604 | 604 | 1234 | 1864 |
| chr22 | 44602532 | 44602544 | + | 12 | C-605 | 605 | 1235 | 1865 |
| chr22 | 45122119 | 45122131 | + | 12 | C-606 | 606 | 1236 | 1866 |
| chr22 | 45181135 | 45181149 | + | 14 | C-607 | 607 | 1237 | 1867 |
| chr22 | 49648856 | 49648869 | + | 13 | C-608 | 608 | 1238 | 1868 |
| chr22 | 49787299 | 49787312 | + | 13 | C-609 | 609 | 1239 | 1869 |
| chr22 | 50185743 | 50185760 | − | 17 | C-610 | 610 | 1240 | 1870 |
| chr22 | 50261995 | 50262013 | + | 18 | C-611 | 611 | 1241 | 1871 |
| chr22 | 50446356 | 50446371 | + | 15 | C-612 | 612 | 1242 | 1872 |
| chrX | 5654055 | 5654067 | + | 12 | C-613 | 613 | 1243 | 1873 |
| chrX | 13837710 | 13837728 | − | 18 | C-614 | 614 | 1244 | 1874 |
| chrX | 17522493 | 17522506 | + | 13 | C-615 | 615 | 1245 | 1875 |
| chrX | 17737422 | 17737448 | + | 26 | C-616 | 616 | 1246 | 1876 |
| chrX | 24742159 | 24742171 | + | 12 | C-617 | 617 | 1247 | 1877 |
| chrX | 31265783 | 31265797 | − | 14 | C-618 | 618 | 1248 | 1878 |
| chrX | 32201469 | 32201483 | + | 14 | C-619 | 619 | 1249 | 1879 |
| chrX | 39878399 | 39878411 | − | 12 | C-620 | 620 | 1250 | 1880 |
| chrX | 40066921 | 40066934 | + | 13 | C-621 | 621 | 1251 | 1881 |
| chrX | 47561969 | 47561981 | + | 12 | C-622 | 622 | 1252 | 1882 |
| chrX | 48921964 | 48921977 | + | 13 | C-623 | 623 | 1253 | 1883 |
| chrX | 94343760 | 94343774 | + | 14 | C-624 | 624 | 1254 | 1884 |
| chrX | 104797185 | 104797201 | + | 16 | C-625 | 625 | 1255 | 1885 |
| chrX | 123961299 | 123961311 | + | 12 | C-626 | 626 | 1256 | 1886 |
| chrX | 129983426 | 129983438 | − | 12 | C-627 | 627 | 1257 | 1887 |
| chrX | 130632364 | 130632376 | − | 12 | C-628 | 628 | 1258 | 1888 |
| chrX | 142637522 | 142637534 | + | 12 | C-629 | 629 | 1259 | 1889 |
| chrX | 150898054 | 150898072 | + | 18 | C-630 | 630 | 1260 | 1890 |

TABLE 10
List of capture probe sequences in AC panel
Genomic coordinates, sequences, and strand information are listed for
microsatellite flanking sequences of 630 loci containing dinucleotide-AC
microsatellites, used in a hybridization capture panel.

| | | | | | | 5′ | 3′ | MS |
|---|---|---|---|---|---|---|---|---|
| | start | end | | length | | flank | flank | SEQ |
| | position | position | | in | locus | SEQ ID | SEQ ID | ID |
| chr | (hg38) | (hg38) | strand | reference | id | NO | NO | NO |
| chr1 | 5273026 | 5273042 | − | 16 | AC-1 | 1891 | 2521 | 3151 |
| chr1 | 5803266 | 5803292 | + | 26 | AC-2 | 1892 | 2522 | 3152 |
| chr1 | 9406555 | 9406580 | + | 25 | AC-3 | 1893 | 2523 | 3153 |
| chr1 | 21616136 | 21616191 | + | 55 | AC-4 | 1894 | 2524 | 3154 |
| chr1 | 32894445 | 32894457 | + | 12 | AC-5 | 1895 | 2525 | 3155 |
| chr1 | 33975486 | 33975513 | + | 27 | AC-6 | 1896 | 2526 | 3156 |
| chr1 | 36249685 | 36249720 | − | 35 | AC-7 | 1897 | 2527 | 3157 |
| chr1 | 42425070 | 42425082 | + | 12 | AC-8 | 1898 | 2528 | 3158 |
| chr1 | 47652657 | 47652700 | − | 43 | AC-9 | 1899 | 2529 | 3159 |
| chr1 | 48889989 | 48890018 | − | 29 | AC-10 | 1900 | 2530 | 3160 |
| chr1 | 48973051 | 48973063 | − | 12 | AC-11 | 1901 | 2531 | 3161 |
| chr1 | 52612060 | 52612072 | + | 12 | AC-12 | 1902 | 2532 | 3162 |
| chr1 | 65166310 | 65166351 | − | 41 | AC-13 | 1903 | 2533 | 3163 |
| chr1 | 67766106 | 67766149 | + | 43 | AC-14 | 1904 | 2534 | 3164 |
| chr1 | 71887992 | 71888036 | + | 44 | AC-15 | 1905 | 2535 | 3165 |
| chr1 | 85577477 | 85577491 | + | 14 | AC-16 | 1906 | 2536 | 3166 |
| chr1 | 85608106 | 85608118 | + | 12 | AC-17 | 1907 | 2537 | 3167 |
| chr1 | 87878048 | 87878073 | − | 25 | AC-18 | 1908 | 2538 | 3168 |
| chr1 | 91073372 | 91073384 | + | 12 | AC-19 | 1909 | 2539 | 3169 |
| chr1 | 95614000 | 95614041 | − | 41 | AC-20 | 1910 | 2540 | 3170 |
| chr1 | 99574683 | 99574697 | − | 14 | AC-21 | 1911 | 2541 | 3171 |
| chr1 | 101895412 | 101895448 | + | 36 | AC-22 | 1912 | 2542 | 3172 |
| chr1 | 113129531 | 113129551 | + | 20 | AC-23 | 1913 | 2543 | 3173 |
| chr1 | 118556180 | 118556203 | + | 23 | AC-24 | 1914 | 2544 | 3174 |
| chr1 | 152512802 | 152512839 | − | 37 | AC-25 | 1915 | 2545 | 3175 |
| chr1 | 154429844 | 154429857 | − | 13 | AC-26 | 1916 | 2546 | 3176 |
| chr1 | 155129513 | 155129548 | + | 35 | AC-27 | 1917 | 2547 | 3177 |
| chr1 | 157013263 | 157013300 | + | 37 | AC-28 | 1918 | 2548 | 3178 |
| chr1 | 160588982 | 160589019 | + | 37 | AC-29 | 1919 | 2549 | 3179 |
| chr1 | 163144212 | 163144224 | − | 12 | AC-30 | 1920 | 2550 | 3180 |
| chr1 | 165928155 | 165928186 | − | 31 | AC-31 | 1921 | 2551 | 3181 |
| chr1 | 168317787 | 168317810 | − | 23 | AC-32 | 1922 | 2552 | 3182 |
| chr1 | 168398963 | 168399004 | − | 41 | AC-33 | 1923 | 2553 | 3183 |
| chr1 | 169369080 | 169369093 | − | 13 | AC-34 | 1924 | 2554 | 3184 |
| chr1 | 176331456 | 176331506 | − | 50 | AC-35 | 1925 | 2555 | 3185 |
| chr1 | 181356341 | 181356363 | − | 22 | AC-36 | 1926 | 2556 | 3186 |
| chr1 | 182289911 | 182289962 | + | 51 | AC-37 | 1927 | 2557 | 3187 |
| chr1 | 182644335 | 182644347 | + | 12 | AC-38 | 1928 | 2558 | 3188 |
| chr1 | 185158268 | 185158282 | − | 14 | AC-39 | 1929 | 2559 | 3189 |
| chr1 | 186375993 | 186376022 | − | 29 | AC-40 | 1930 | 2560 | 3190 |
| chr1 | 189039446 | 189039461 | + | 15 | AC-41 | 1931 | 2561 | 3191 |
| chr1 | 203102658 | 203102694 | + | 36 | AC-42 | 1932 | 2562 | 3192 |
| chr1 | 203997182 | 203997230 | − | 48 | AC-43 | 1933 | 2563 | 3193 |
| chr1 | 205048910 | 205048960 | − | 50 | AC-44 | 1934 | 2564 | 3194 |
| chr1 | 206501638 | 206501680 | + | 42 | AC-45 | 1935 | 2565 | 3195 |
| chr1 | 214214171 | 214214218 | + | 47 | AC-46 | 1936 | 2566 | 3196 |
| chr1 | 221277846 | 221277859 | + | 13 | AC-47 | 1937 | 2567 | 3197 |
| chr1 | 222424829 | 222424841 | + | 12 | AC-48 | 1938 | 2568 | 3198 |
| chr1 | 223036108 | 223036121 | − | 13 | AC-49 | 1939 | 2569 | 3199 |
| chr1 | 230353426 | 230353440 | + | 14 | AC-50 | 1940 | 2570 | 3200 |
| chr1 | 232060618 | 232060630 | + | 12 | AC-51 | 1941 | 2571 | 3201 |
| chr1 | 233512134 | 233512149 | − | 15 | AC-52 | 1942 | 2572 | 3202 |
| chr1 | 238887748 | 238887773 | + | 25 | AC-53 | 1943 | 2573 | 3203 |
| chr1 | 241147137 | 241147149 | + | 12 | AC-54 | 1944 | 2574 | 3204 |
| chr10 | 1994136 | 1994171 | + | 35 | AC-55 | 1945 | 2575 | 3205 |
| chr10 | 3343104 | 3343138 | + | 34 | AC-56 | 1946 | 2576 | 3206 |
| chr10 | 7085186 | 7085199 | + | 13 | AC-57 | 1947 | 2577 | 3207 |
| chr10 | 7572113 | 7572126 | − | 13 | AC-58 | 1948 | 2578 | 3208 |
| chr10 | 12704059 | 12704075 | − | 16 | AC-59 | 1949 | 2579 | 3209 |
| chr10 | 16661287 | 16661329 | − | 42 | AC-60 | 1950 | 2580 | 3210 |
| chr10 | 23292998 | 23293016 | − | 18 | AC-61 | 1951 | 2581 | 3211 |
| chr10 | 23691684 | 23691737 | − | 53 | AC-62 | 1952 | 2582 | 3212 |
| chr10 | 31073663 | 31073703 | − | 40 | AC-63 | 1953 | 2583 | 3213 |
| chr10 | 43143493 | 43143537 | − | 44 | AC-64 | 1954 | 2584 | 3214 |
| chr10 | 58988933 | 58988954 | − | 21 | AC-65 | 1955 | 2585 | 3215 |
| chr10 | 60272089 | 60272127 | − | 38 | AC-66 | 1956 | 2586 | 3216 |
| chr10 | 61238230 | 61238242 | + | 12 | AC-67 | 1957 | 2587 | 3217 |
| chr10 | 61993120 | 61993150 | + | 30 | AC-68 | 1958 | 2588 | 3218 |
| chr10 | 62563328 | 62563363 | + | 35 | AC-69 | 1959 | 2589 | 3219 |
| chr10 | 69735131 | 69735143 | + | 12 | AC-70 | 1960 | 2590 | 3220 |
| chr10 | 85616976 | 85616988 | + | 12 | AC-71 | 1961 | 2591 | 3221 |
| chr10 | 87703276 | 87703316 | − | 40 | AC-72 | 1962 | 2592 | 3222 |
| chr10 | 89086320 | 89086358 | − | 38 | AC-73 | 1963 | 2593 | 3223 |
| chr10 | 89172566 | 89172602 | − | 36 | AC-74 | 1964 | 2594 | 3224 |
| chr10 | 101249577 | 101249590 | − | 13 | AC-75 | 1965 | 2595 | 3225 |
| chr10 | 101566446 | 101566458 | − | 12 | AC-76 | 1966 | 2596 | 3226 |
| chr10 | 113621314 | 113621341 | + | 27 | AC-77 | 1967 | 2597 | 3227 |
| chr10 | 113632834 | 113632848 | − | 14 | AC-78 | 1968 | 2598 | 3228 |
| chr10 | 125841187 | 125841200 | − | 13 | AC-79 | 1969 | 2599 | 3229 |
| chr11 | 2834067 | 2834079 | + | 12 | AC-80 | 1970 | 2600 | 3230 |
| chr11 | 10900297 | 10900333 | − | 36 | AC-81 | 1971 | 2601 | 3231 |
| chr11 | 19953858 | 19953882 | − | 24 | AC-82 | 1972 | 2602 | 3232 |
| chr11 | 23347472 | 23347508 | + | 36 | AC-83 | 1973 | 2603 | 3233 |
| chr11 | 23447836 | 23447867 | − | 31 | AC-84 | 1974 | 2604 | 3234 |
| chr11 | 25680078 | 25680113 | + | 35 | AC-85 | 1975 | 2605 | 3235 |
| chr11 | 38474448 | 38474491 | + | 43 | AC-86 | 1976 | 2606 | 3236 |
| chr11 | 39114247 | 39114284 | − | 37 | AC-87 | 1977 | 2607 | 3237 |
| chr11 | 56754460 | 56754476 | + | 16 | AC-88 | 1978 | 2608 | 3238 |
| chr11 | 58689177 | 58689190 | + | 13 | AC-89 | 1979 | 2609 | 3239 |
| chr11 | 70660519 | 70660531 | − | 12 | AC-90 | 1980 | 2610 | 3240 |
| chr11 | 77304988 | 77305031 | + | 43 | AC-91 | 1981 | 2611 | 3241 |
| chr11 | 79081534 | 79081561 | − | 27 | AC-92 | 1982 | 2612 | 3242 |
| chr11 | 87376057 | 87376087 | + | 30 | AC-93 | 1983 | 2613 | 3243 |
| chr11 | 89491727 | 89491766 | + | 39 | AC-94 | 1984 | 2614 | 3244 |
| chr11 | 93633463 | 93633502 | + | 39 | AC-95 | 1985 | 2615 | 3245 |
| chr11 | 105917815 | 105917855 | − | 40 | AC-96 | 1986 | 2616 | 3246 |
| chr11 | 106990585 | 106990601 | − | 16 | AC-97 | 1987 | 2617 | 3247 |
| chr11 | 109832817 | 109832838 | − | 21 | AC-98 | 1988 | 2618 | 3248 |
| chr11 | 110953986 | 110953999 | + | 13 | AC-99 | 1989 | 2619 | 3249 |
| chr11 | 116660717 | 116660733 | + | 16 | AC-100 | 1990 | 2620 | 3250 |
| chr11 | 117738113 | 117738126 | − | 13 | AC-101 | 1991 | 2621 | 3251 |
| chr11 | 121235552 | 121235584 | + | 32 | AC-102 | 1992 | 2622 | 3252 |
| chr11 | 125612783 | 125612798 | − | 15 | AC-103 | 1993 | 2623 | 3253 |
| chr11 | 125748814 | 125748835 | + | 21 | AC-104 | 1994 | 2624 | 3254 |
| chr11 | 127148450 | 127148470 | − | 20 | AC-105 | 1995 | 2625 | 3255 |
| chr12 | 152701 | 152713 | + | 12 | AC-106 | 1996 | 2626 | 3256 |
| chr12 | 4166085 | 4166098 | + | 13 | AC-107 | 1997 | 2627 | 3257 |
| chr12 | 8751503 | 8751515 | − | 12 | AC-108 | 1998 | 2628 | 3258 |
| chr12 | 10223341 | 10223370 | − | 29 | AC-109 | 1999 | 2629 | 3259 |
| chr12 | 13085665 | 13085678 | + | 13 | AC-110 | 2000 | 2630 | 3260 |
| chr12 | 26451365 | 26451408 | + | 43 | AC-111 | 2001 | 2631 | 3261 |
| chr12 | 27909439 | 27909474 | − | 35 | AC-112 | 2002 | 2632 | 3262 |
| chr12 | 31340560 | 31340572 | − | 12 | AC-113 | 2003 | 2633 | 3263 |
| chr12 | 43288359 | 43288378 | − | 19 | AC-114 | 2004 | 2634 | 3264 |
| chr12 | 55318221 | 55318264 | − | 43 | AC-115 | 2005 | 2635 | 3265 |
| chr12 | 56190258 | 56190270 | − | 12 | AC-116 | 2006 | 2636 | 3266 |
| chr12 | 57139812 | 57139825 | + | 13 | AC-117 | 2007 | 2637 | 3267 |
| chr12 | 58815083 | 58815095 | + | 12 | AC-118 | 2008 | 2638 | 3268 |
| chr12 | 61520450 | 61520472 | + | 22 | AC-119 | 2009 | 2639 | 3269 |
| chr12 | 64948574 | 64948623 | + | 49 | AC-120 | 2010 | 2640 | 3270 |
| chr12 | 65639748 | 65639791 | + | 43 | AC-121 | 2011 | 2641 | 3271 |
| chr12 | 65653655 | 65653668 | + | 13 | AC-122 | 2012 | 2642 | 3272 |
| chr12 | 65931551 | 65931590 | − | 39 | AC-123 | 2013 | 2643 | 3273 |
| chr12 | 74155091 | 74155103 | + | 12 | AC-124 | 2014 | 2644 | 3274 |
| chr12 | 75213132 | 75213167 | + | 35 | AC-125 | 2015 | 2645 | 3275 |
| chr12 | 75544924 | 75544941 | − | 17 | AC-126 | 2016 | 2646 | 3276 |
| chr12 | 79269695 | 79269714 | + | 19 | AC-127 | 2017 | 2647 | 3277 |
| chr12 | 80039018 | 80039033 | − | 15 | AC-128 | 2018 | 2648 | 3278 |
| chr12 | 83664411 | 83664431 | − | 20 | AC-129 | 2019 | 2649 | 3279 |
| chr12 | 85465254 | 85465291 | − | 37 | AC-130 | 2020 | 2650 | 3280 |
| chr12 | 88070093 | 88070105 | + | 12 | AC-131 | 2021 | 2651 | 3281 |
| chr12 | 96236589 | 96236602 | − | 13 | AC-132 | 2022 | 2652 | 3282 |
| chr12 | 96521503 | 96521548 | − | 45 | AC-133 | 2023 | 2653 | 3283 |
| chr12 | 105427778 | 105427802 | − | 24 | AC-134 | 2024 | 2654 | 3284 |
| chr12 | 108130475 | 108130521 | − | 46 | AC-135 | 2025 | 2655 | 3285 |
| chr12 | 113048989 | 113049024 | + | 35 | AC-136 | 2026 | 2656 | 3286 |
| chr12 | 114001557 | 114001574 | − | 17 | AC-137 | 2027 | 2657 | 3287 |
| chr12 | 120766100 | 120766142 | + | 42 | AC-138 | 2028 | 2658 | 3288 |
| chr12 | 127558627 | 127558642 | − | 15 | AC-139 | 2029 | 2659 | 3289 |
| chr13 | 25139859 | 25139888 | + | 29 | AC-140 | 2030 | 2660 | 3290 |
| chr13 | 26944328 | 26944373 | − | 45 | AC-141 | 2031 | 2661 | 3291 |
| chr13 | 27923032 | 27923044 | + | 12 | AC-142 | 2032 | 2662 | 3292 |
| chr13 | 37492152 | 37492172 | − | 20 | AC-143 | 2033 | 2663 | 3293 |
| chr13 | 40235907 | 40235949 | − | 42 | AC-144 | 2034 | 2664 | 3294 |
| chr13 | 47623464 | 47623478 | + | 14 | AC-145 | 2035 | 2665 | 3295 |
| chr13 | 50727214 | 50727233 | − | 19 | AC-146 | 2036 | 2666 | 3296 |
| chr13 | 62203068 | 62203085 | − | 17 | AC-147 | 2037 | 2667 | 3297 |
| chr13 | 66659804 | 66659817 | − | 13 | AC-148 | 2038 | 2668 | 3298 |
| chr13 | 70313232 | 70313246 | + | 14 | AC-149 | 2039 | 2669 | 3299 |
| chr13 | 71216982 | 71217004 | − | 22 | AC-150 | 2040 | 2670 | 3300 |
| chr13 | 84316395 | 84316410 | + | 15 | AC-151 | 2041 | 2671 | 3301 |
| chr13 | 94796168 | 94796210 | − | 42 | AC-152 | 2042 | 2672 | 3302 |
| chr13 | 96868406 | 96868423 | + | 17 | AC-153 | 2043 | 2673 | 3303 |
| chr13 | 101347140 | 101347166 | + | 26 | AC-154 | 2044 | 2674 | 3304 |
| chr13 | 101400544 | 101400581 | − | 37 | AC-155 | 2045 | 2675 | 3305 |
| chr13 | 104766495 | 104766509 | + | 14 | AC-156 | 2046 | 2676 | 3306 |
| chr13 | 106836459 | 106836477 | + | 18 | AC-157 | 2047 | 2677 | 3307 |
| chr14 | 21067761 | 21067785 | + | 24 | AC-158 | 2048 | 2678 | 3308 |
| chr14 | 38003713 | 38003727 | − | 14 | AC-159 | 2049 | 2679 | 3309 |
| chr14 | 41404996 | 41405011 | + | 15 | AC-160 | 2050 | 2680 | 3310 |
| chr14 | 44327286 | 44327298 | + | 12 | AC-161 | 2051 | 2681 | 3311 |
| chr14 | 51294075 | 51294088 | − | 13 | AC-162 | 2052 | 2682 | 3312 |
| chr14 | 55921918 | 55921931 | − | 13 | AC-163 | 2053 | 2683 | 3313 |
| chr14 | 56583990 | 56584027 | − | 37 | AC-164 | 2054 | 2684 | 3314 |
| chr14 | 57073832 | 57073845 | + | 13 | AC-165 | 2055 | 2685 | 3315 |
| chr14 | 57477486 | 57477505 | + | 19 | AC-166 | 2056 | 2686 | 3316 |
| chr14 | 59156718 | 59156749 | − | 31 | AC-167 | 2057 | 2687 | 3317 |
| chr14 | 67225926 | 67225963 | − | 37 | AC-168 | 2058 | 2688 | 3318 |
| chr14 | 67442428 | 67442441 | − | 13 | AC-169 | 2059 | 2689 | 3319 |
| chr14 | 67657598 | 67657623 | + | 25 | AC-170 | 2060 | 2690 | 3320 |
| chr14 | 69731578 | 69731625 | − | 47 | AC-171 | 2061 | 2691 | 3321 |
| chr14 | 84017033 | 84017047 | − | 14 | AC-172 | 2062 | 2692 | 3322 |
| chr14 | 88942813 | 88942825 | + | 12 | AC-173 | 2063 | 2693 | 3323 |
| chr14 | 97600226 | 97600239 | − | 13 | AC-174 | 2064 | 2694 | 3324 |
| chr14 | 98844420 | 98844434 | + | 14 | AC-175 | 2065 | 2695 | 3325 |
| chr14 | 99029822 | 99029834 | − | 12 | AC-176 | 2066 | 2696 | 3326 |
| chr14 | 99094458 | 99094479 | + | 21 | AC-177 | 2067 | 2697 | 3327 |
| chr14 | 99261878 | 99261895 | + | 17 | AC-178 | 2068 | 2698 | 3328 |
| chr15 | 31775089 | 31775119 | + | 30 | AC-179 | 2069 | 2699 | 3329 |
| chr15 | 36645494 | 36645532 | − | 38 | AC-180 | 2070 | 2700 | 3330 |
| chr15 | 36774133 | 36774164 | − | 31 | AC-181 | 2071 | 2701 | 3331 |
| chr15 | 40107533 | 40107575 | − | 42 | AC-182 | 2072 | 2702 | 3332 |
| chr15 | 44628870 | 44628885 | − | 15 | AC-183 | 2073 | 2703 | 3333 |
| chr15 | 47331277 | 47331289 | − | 12 | AC-184 | 2074 | 2704 | 3334 |
| chr15 | 48975543 | 48975560 | + | 17 | AC-185 | 2075 | 2705 | 3335 |
| chr15 | 48982679 | 48982732 | − | 53 | AC-186 | 2076 | 2706 | 3336 |
| chr15 | 53246231 | 53246268 | + | 37 | AC-187 | 2077 | 2707 | 3337 |
| chr15 | 58586916 | 58586950 | − | 34 | AC-188 | 2078 | 2708 | 3338 |
| chr15 | 66800703 | 66800735 | + | 32 | AC-189 | 2079 | 2709 | 3339 |
| chr15 | 71741684 | 71741728 | + | 44 | AC-190 | 2080 | 2710 | 3340 |
| chr15 | 83479331 | 83479351 | − | 20 | AC-191 | 2081 | 2711 | 3341 |
| chr15 | 88392218 | 88392257 | − | 39 | AC-192 | 2082 | 2712 | 3342 |
| chr15 | 100721147 | 100721183 | − | 36 | AC-193 | 2083 | 2713 | 3343 |
| chr16 | 4518154 | 4518169 | + | 15 | AC-194 | 2084 | 2714 | 3344 |
| chr16 | 10220039 | 10220052 | + | 13 | AC-195 | 2085 | 2715 | 3345 |
| chr16 | 13058751 | 13058783 | − | 32 | AC-196 | 2086 | 2716 | 3346 |
| chr16 | 19143314 | 19143326 | + | 12 | AC-197 | 2087 | 2717 | 3347 |
| chr16 | 20008079 | 20008123 | − | 44 | AC-198 | 2088 | 2718 | 3348 |
| chr16 | 22170787 | 22170800 | − | 13 | AC-199 | 2089 | 2719 | 3349 |
| chr16 | 22622485 | 22622529 | − | 44 | AC-200 | 2090 | 2720 | 3350 |
| chr16 | 25270696 | 25270708 | + | 12 | AC-201 | 2091 | 2721 | 3351 |
| chr16 | 31187213 | 31187225 | − | 12 | AC-202 | 2092 | 2722 | 3352 |
| chr16 | 51187020 | 51187071 | − | 51 | AC-203 | 2093 | 2723 | 3353 |
| chr16 | 54173946 | 54173958 | − | 12 | AC-204 | 2094 | 2724 | 3354 |
| chr16 | 63276767 | 63276789 | − | 22 | AC-205 | 2095 | 2725 | 3355 |
| chr16 | 64226570 | 64226585 | + | 15 | AC-206 | 2096 | 2726 | 3356 |
| chr16 | 65286227 | 65286269 | + | 42 | AC-207 | 2097 | 2727 | 3357 |
| chr16 | 66902100 | 66902137 | + | 37 | AC-208 | 2098 | 2728 | 3358 |
| chr16 | 79398635 | 79398650 | − | 15 | AC-209 | 2099 | 2729 | 3359 |
| chr16 | 80163777 | 80163800 | + | 23 | AC-210 | 2100 | 2730 | 3360 |
| chr16 | 84126736 | 84126751 | + | 15 | AC-211 | 2101 | 2731 | 3361 |
| chr16 | 85135615 | 85135636 | − | 21 | AC-212 | 2102 | 2732 | 3362 |
| chr17 | 17358350 | 17358381 | + | 31 | AC-213 | 2103 | 2733 | 3363 |
| chr17 | 33317886 | 33317928 | − | 42 | AC-214 | 2104 | 2734 | 3364 |
| chr17 | 34554923 | 34554938 | + | 15 | AC-215 | 2105 | 2735 | 3365 |
| chr17 | 39236064 | 39236095 | − | 31 | AC-216 | 2106 | 2736 | 3366 |
| chr17 | 40309936 | 40309953 | − | 17 | AC-217 | 2107 | 2737 | 3367 |
| chr17 | 49514056 | 49514070 | + | 14 | AC-218 | 2108 | 2738 | 3368 |
| chr17 | 50852653 | 50852695 | + | 42 | AC-219 | 2109 | 2739 | 3369 |
| chr17 | 51007110 | 51007139 | − | 29 | AC-220 | 2110 | 2740 | 3370 |
| chr17 | 65137980 | 65137994 | − | 14 | AC-221 | 2111 | 2741 | 3371 |
| chr17 | 65205024 | 65205036 | − | 12 | AC-222 | 2112 | 2742 | 3372 |
| chr17 | 66444942 | 66444954 | + | 12 | AC-223 | 2113 | 2743 | 3373 |
| chr17 | 69507332 | 69507356 | − | 24 | AC-224 | 2114 | 2744 | 3374 |
| chr17 | 71156495 | 71156527 | + | 32 | AC-225 | 2115 | 2745 | 3375 |
| chr17 | 76451779 | 76451803 | − | 24 | AC-226 | 2116 | 2746 | 3376 |
| chr17 | 81522657 | 81522670 | − | 13 | AC-227 | 2117 | 2747 | 3377 |
| chr18 | 5931560 | 5931583 | + | 23 | AC-228 | 2118 | 2748 | 3378 |
| chr18 | 28860767 | 28860798 | + | 31 | AC-229 | 2119 | 2749 | 3379 |
| chr18 | 31709553 | 31709604 | − | 51 | AC-230 | 2120 | 2750 | 3380 |
| chr18 | 34496205 | 34496245 | + | 40 | AC-231 | 2121 | 2751 | 3381 |
| chr18 | 34633662 | 34633674 | + | 12 | AC-232 | 2122 | 2752 | 3382 |
| chr18 | 35431510 | 35431526 | − | 16 | AC-233 | 2123 | 2753 | 3383 |
| chr18 | 38159575 | 38159613 | + | 38 | AC-234 | 2124 | 2754 | 3384 |
| chr18 | 47701045 | 47701057 | − | 12 | AC-235 | 2125 | 2755 | 3385 |
| chr18 | 47717937 | 47717966 | − | 29 | AC-236 | 2126 | 2756 | 3386 |
| chr18 | 49027460 | 49027503 | − | 43 | AC-237 | 2127 | 2757 | 3387 |
| chr18 | 55538026 | 55538067 | + | 41 | AC-238 | 2128 | 2758 | 3388 |
| chr18 | 56524136 | 56524159 | + | 23 | AC-239 | 2129 | 2759 | 3389 |
| chr18 | 60545292 | 60545339 | − | 47 | AC-240 | 2130 | 2760 | 3390 |
| chr18 | 62828008 | 62828045 | − | 37 | AC-241 | 2131 | 2761 | 3391 |
| chr18 | 64406019 | 64406053 | + | 34 | AC-242 | 2132 | 2762 | 3392 |
| chr18 | 66444246 | 66444258 | − | 12 | AC-243 | 2133 | 2763 | 3393 |
| chr18 | 67130891 | 67130908 | − | 17 | AC-244 | 2134 | 2764 | 3394 |
| chr18 | 71055956 | 71056004 | − | 48 | AC-245 | 2135 | 2765 | 3395 |
| chr18 | 72205692 | 72205707 | + | 15 | AC-246 | 2136 | 2766 | 3396 |
| chr18 | 73334311 | 73334354 | − | 43 | AC-247 | 2137 | 2767 | 3397 |
| chr18 | 74589244 | 74589259 | + | 15 | AC-248 | 2138 | 2768 | 3398 |
| chr18 | 77992959 | 77992972 | − | 13 | AC-249 | 2139 | 2769 | 3399 |
| chr19 | 1304563 | 1304575 | + | 12 | AC-250 | 2140 | 2770 | 3400 |
| chr19 | 1524600 | 1524632 | − | 32 | AC-251 | 2141 | 2771 | 3401 |
| chr19 | 13400195 | 13400208 | − | 13 | AC-252 | 2142 | 2772 | 3402 |
| chr19 | 28132636 | 28132661 | + | 25 | AC-253 | 2143 | 2773 | 3403 |
| chr19 | 33269330 | 33269364 | − | 34 | AC-254 | 2144 | 2774 | 3404 |
| chr19 | 33578137 | 33578165 | − | 28 | AC-255 | 2145 | 2775 | 3405 |
| chr19 | 33800199 | 33800211 | − | 12 | AC-256 | 2146 | 2776 | 3406 |
| chr19 | 35501212 | 35501226 | + | 14 | AC-257 | 2147 | 2777 | 3407 |
| chr19 | 40441325 | 40441338 | + | 13 | AC-258 | 2148 | 2778 | 3408 |
| chr2 | 5621363 | 5621377 | + | 14 | AC-259 | 2149 | 2779 | 3409 |
| chr2 | 6503432 | 6503463 | + | 31 | AC-260 | 2150 | 2780 | 3410 |
| chr2 | 7795345 | 7795387 | − | 42 | AC-261 | 2151 | 2781 | 3411 |
| chr2 | 8035588 | 8035600 | + | 12 | AC-262 | 2152 | 2782 | 3412 |
| chr2 | 11842276 | 11842324 | − | 48 | AC-263 | 2153 | 2783 | 3413 |
| chr2 | 12196457 | 12196469 | + | 12 | AC-264 | 2154 | 2784 | 3414 |
| chr2 | 18653522 | 18653538 | − | 16 | AC-265 | 2155 | 2785 | 3415 |
| chr2 | 19339740 | 19339753 | − | 13 | AC-266 | 2156 | 2786 | 3416 |
| chr2 | 19914533 | 19914548 | + | 15 | AC-267 | 2157 | 2787 | 3417 |
| chr2 | 26617120 | 26617148 | − | 28 | AC-268 | 2158 | 2788 | 3418 |
| chr2 | 27696661 | 27696677 | + | 16 | AC-269 | 2159 | 2789 | 3419 |
| chr2 | 42711783 | 42711815 | − | 32 | AC-270 | 2160 | 2790 | 3420 |
| chr2 | 47070401 | 47070413 | − | 12 | AC-271 | 2161 | 2791 | 3421 |
| chr2 | 50759826 | 50759870 | − | 44 | AC-272 | 2162 | 2792 | 3422 |
| chr2 | 54953457 | 54953469 | − | 12 | AC-273 | 2163 | 2793 | 3423 |
| chr2 | 55765032 | 55765044 | − | 12 | AC-274 | 2164 | 2794 | 3424 |
| chr2 | 58627465 | 58627486 | − | 21 | AC-275 | 2165 | 2795 | 3425 |
| chr2 | 61705891 | 61705903 | + | 12 | AC-276 | 2166 | 2796 | 3426 |
| chr2 | 62588519 | 62588551 | + | 32 | AC-277 | 2167 | 2797 | 3427 |
| chr2 | 66189715 | 66189727 | + | 12 | AC-278 | 2168 | 2798 | 3428 |
| chr2 | 70827642 | 70827657 | + | 15 | AC-279 | 2169 | 2799 | 3429 |
| chr2 | 70943187 | 70943207 | + | 20 | AC-280 | 2170 | 2800 | 3430 |
| chr2 | 71342683 | 71342697 | − | 14 | AC-281 | 2171 | 2801 | 3431 |
| chr2 | 75427136 | 75427178 | − | 42 | AC-282 | 2172 | 2802 | 3432 |
| chr2 | 77605188 | 77605209 | + | 21 | AC-283 | 2173 | 2803 | 3433 |
| chr2 | 80183884 | 80183910 | − | 26 | AC-284 | 2174 | 2804 | 3434 |
| chr2 | 85790322 | 85790334 | − | 12 | AC-285 | 2175 | 2805 | 3435 |
| chr2 | 95144909 | 95144926 | + | 17 | AC-286 | 2176 | 2806 | 3436 |
| chr2 | 100895107 | 100895120 | + | 13 | AC-287 | 2177 | 2807 | 3437 |
| chr2 | 103211514 | 103211529 | − | 15 | AC-288 | 2178 | 2808 | 3438 |
| chr2 | 104530832 | 104530848 | + | 16 | AC-289 | 2179 | 2809 | 3439 |
| chr2 | 105294307 | 105294337 | − | 30 | AC-290 | 2180 | 2810 | 3440 |
| chr2 | 105440122 | 105440134 | + | 12 | AC-291 | 2181 | 2811 | 3441 |
| chr2 | 117424784 | 117424797 | − | 13 | AC-292 | 2182 | 2812 | 3442 |
| chr2 | 118851472 | 118851509 | − | 37 | AC-293 | 2183 | 2813 | 3443 |
| chr2 | 121528603 | 121528615 | + | 12 | AC-294 | 2184 | 2814 | 3444 |
| chr2 | 121804439 | 121804454 | − | 15 | AC-295 | 2185 | 2815 | 3445 |
| chr2 | 122661750 | 122661762 | − | 12 | AC-296 | 2186 | 2816 | 3446 |
| chr2 | 133586751 | 133586795 | + | 44 | AC-297 | 2187 | 2817 | 3447 |
| chr2 | 137893068 | 137893081 | + | 13 | AC-298 | 2188 | 2818 | 3448 |
| chr2 | 141480159 | 141480194 | − | 35 | AC-299 | 2189 | 2819 | 3449 |
| chr2 | 141517273 | 141517289 | + | 16 | AC-300 | 2190 | 2820 | 3450 |
| chr2 | 144019435 | 144019483 | − | 48 | AC-301 | 2191 | 2821 | 3451 |
| chr2 | 144368870 | 144368887 | + | 17 | AC-302 | 2192 | 2822 | 3452 |
| chr2 | 146239369 | 146239408 | + | 39 | AC-303 | 2193 | 2823 | 3453 |
| chr2 | 147556100 | 147556138 | − | 38 | AC-304 | 2194 | 2824 | 3454 |
| chr2 | 149149417 | 149149433 | + | 16 | AC-305 | 2195 | 2825 | 3455 |
| chr2 | 167196412 | 167196451 | − | 39 | AC-306 | 2196 | 2826 | 3456 |
| chr2 | 170313865 | 170313878 | + | 13 | AC-307 | 2197 | 2827 | 3457 |
| chr2 | 170375721 | 170375745 | + | 24 | AC-308 | 2198 | 2828 | 3458 |
| chr2 | 175171165 | 175171184 | − | 19 | AC-309 | 2199 | 2829 | 3459 |
| chr2 | 177652123 | 177652135 | + | 12 | AC-310 | 2200 | 2830 | 3460 |
| chr2 | 178791663 | 178791689 | − | 26 | AC-311 | 2201 | 2831 | 3461 |
| chr2 | 180327353 | 180327365 | − | 12 | AC-312 | 2202 | 2832 | 3462 |
| chr2 | 198126991 | 198127012 | − | 21 | AC-313 | 2203 | 2833 | 3463 |
| chr2 | 199627446 | 199627478 | − | 32 | AC-314 | 2204 | 2834 | 3464 |
| chr2 | 201933089 | 201933105 | − | 16 | AC-315 | 2205 | 2835 | 3465 |
| chr2 | 205765349 | 205765368 | + | 19 | AC-316 | 2206 | 2836 | 3466 |
| chr2 | 206631959 | 206631973 | − | 14 | AC-317 | 2207 | 2837 | 3467 |
| chr2 | 206837280 | 206837306 | + | 26 | AC-318 | 2208 | 2838 | 3468 |
| chr2 | 213440109 | 213440124 | − | 15 | AC-319 | 2209 | 2839 | 3469 |
| chr2 | 216362283 | 216362296 | + | 13 | AC-320 | 2210 | 2840 | 3470 |
| chr2 | 217910713 | 217910762 | + | 49 | AC-321 | 2211 | 2841 | 3471 |
| chr2 | 217986730 | 217986762 | + | 32 | AC-322 | 2212 | 2842 | 3472 |
| chr2 | 218856787 | 218856822 | − | 35 | AC-323 | 2213 | 2843 | 3473 |
| chr2 | 219917944 | 219917978 | − | 34 | AC-324 | 2214 | 2844 | 3474 |
| chr2 | 220466852 | 220466875 | − | 23 | AC-325 | 2215 | 2845 | 3475 |
| chr2 | 226565658 | 226565678 | + | 20 | AC-326 | 2216 | 2846 | 3476 |
| chr2 | 227167895 | 227167908 | − | 13 | AC-327 | 2217 | 2847 | 3477 |
| chr2 | 229086910 | 229086938 | + | 28 | AC-328 | 2218 | 2848 | 3478 |
| chr2 | 232903436 | 232903461 | + | 25 | AC-329 | 2219 | 2849 | 3479 |
| chr2 | 234254256 | 234254275 | + | 19 | AC-330 | 2220 | 2850 | 3480 |
| chr2 | 236592543 | 236592555 | + | 12 | AC-331 | 2221 | 2851 | 3481 |
| chr2 | 237053674 | 237053687 | + | 13 | AC-332 | 2222 | 2852 | 3482 |
| chr2 | 238821668 | 238821682 | − | 14 | AC-333 | 2223 | 2853 | 3483 |
| chr20 | 1342147 | 1342172 | + | 25 | AC-334 | 2224 | 2854 | 3484 |
| chr20 | 11048993 | 11049022 | + | 29 | AC-335 | 2225 | 2855 | 3485 |
| chr20 | 16745165 | 16745199 | + | 34 | AC-336 | 2226 | 2856 | 3486 |
| chr20 | 19499916 | 19499932 | − | 16 | AC-337 | 2227 | 2857 | 3487 |
| chr20 | 20880235 | 20880284 | − | 49 | AC-338 | 2228 | 2858 | 3488 |
| chr20 | 22948907 | 22948922 | + | 15 | AC-339 | 2229 | 2859 | 3489 |
| chr20 | 23045210 | 23045227 | + | 17 | AC-340 | 2230 | 2860 | 3490 |
| chr20 | 36113408 | 36113455 | − | 47 | AC-341 | 2231 | 2861 | 3491 |
| chr20 | 38426995 | 38427033 | + | 38 | AC-342 | 2232 | 2862 | 3492 |
| chr20 | 41972646 | 41972658 | + | 12 | AC-343 | 2233 | 2863 | 3493 |
| chr20 | 43711429 | 43711441 | + | 12 | AC-344 | 2234 | 2864 | 3494 |
| chr20 | 46745042 | 46745060 | − | 18 | AC-345 | 2235 | 2865 | 3495 |
| chr20 | 47509448 | 47509461 | − | 13 | AC-346 | 2236 | 2866 | 3496 |
| chr20 | 50762751 | 50762781 | + | 30 | AC-347 | 2237 | 2867 | 3497 |
| chr20 | 52497640 | 52497672 | − | 32 | AC-348 | 2238 | 2868 | 3498 |
| chr20 | 52637926 | 52637955 | − | 29 | AC-349 | 2239 | 2869 | 3499 |
| chr20 | 52704971 | 52704984 | + | 13 | AC-350 | 2240 | 2870 | 3500 |
| chr21 | 17789253 | 17789287 | + | 34 | AC-351 | 2241 | 2871 | 3501 |
| chr21 | 20996105 | 20996147 | − | 42 | AC-352 | 2242 | 2872 | 3502 |
| chr21 | 34190142 | 34190162 | + | 20 | AC-353 | 2243 | 2873 | 3503 |
| chr21 | 35086392 | 35086425 | + | 33 | AC-354 | 2244 | 2874 | 3504 |
| chr21 | 36696792 | 36696808 | − | 16 | AC-355 | 2245 | 2875 | 3505 |
| chr21 | 41518473 | 41518504 | + | 31 | AC-356 | 2246 | 2876 | 3506 |
| chr21 | 42530595 | 42530655 | + | 60 | AC-357 | 2247 | 2877 | 3507 |
| chr22 | 31274832 | 31274844 | + | 12 | AC-358 | 2248 | 2878 | 3508 |
| chr22 | 32423577 | 32423607 | − | 30 | AC-359 | 2249 | 2879 | 3509 |
| chr22 | 33969491 | 33969503 | − | 12 | AC-360 | 2250 | 2880 | 3510 |
| chr22 | 35643499 | 35643525 | + | 26 | AC-361 | 2251 | 2881 | 3511 |
| chr22 | 36295401 | 36295422 | − | 21 | AC-362 | 2252 | 2882 | 3512 |
| chr3 | 14622530 | 14622562 | − | 32 | AC-363 | 2253 | 2883 | 3513 |
| chr3 | 15705328 | 15705340 | − | 12 | AC-364 | 2254 | 2884 | 3514 |
| chr3 | 18399927 | 18399939 | − | 12 | AC-365 | 2255 | 2885 | 3515 |
| chr3 | 22963762 | 22963785 | + | 23 | AC-366 | 2256 | 2886 | 3516 |
| chr3 | 35302794 | 35302838 | + | 44 | AC-367 | 2257 | 2887 | 3517 |
| chr3 | 37921607 | 37921644 | + | 37 | AC-368 | 2258 | 2888 | 3518 |
| chr3 | 48845469 | 48845481 | − | 12 | AC-369 | 2259 | 2889 | 3519 |
| chr3 | 49780309 | 49780342 | + | 33 | AC-370 | 2260 | 2890 | 3520 |
| chr3 | 53586276 | 53586320 | − | 44 | AC-371 | 2261 | 2891 | 3521 |
| chr3 | 61065268 | 61065295 | + | 27 | AC-372 | 2262 | 2892 | 3522 |
| chr3 | 61637728 | 61637741 | − | 13 | AC-373 | 2263 | 2893 | 3523 |
| chr3 | 66487585 | 66487600 | + | 15 | AC-374 | 2264 | 2894 | 3524 |
| chr3 | 83182081 | 83182109 | − | 28 | AC-375 | 2265 | 2895 | 3525 |
| chr3 | 86495672 | 86495686 | − | 14 | AC-376 | 2266 | 2896 | 3526 |
| chr3 | 97255144 | 97255181 | − | 37 | AC-377 | 2267 | 2897 | 3527 |
| chr3 | 99205670 | 99205706 | − | 36 | AC-378 | 2268 | 2898 | 3528 |
| chr3 | 109841830 | 109841859 | − | 29 | AC-379 | 2269 | 2899 | 3529 |
| chr3 | 115955645 | 115955657 | − | 12 | AC-380 | 2270 | 2900 | 3530 |
| chr3 | 117756399 | 117756411 | + | 12 | AC-381 | 2271 | 2901 | 3531 |
| chr3 | 123275925 | 123275938 | − | 13 | AC-382 | 2272 | 2902 | 3532 |
| chr3 | 126124110 | 126124148 | + | 38 | AC-383 | 2273 | 2903 | 3533 |
| chr3 | 128207566 | 128207604 | + | 38 | AC-384 | 2274 | 2904 | 3534 |
| chr3 | 134308065 | 134308077 | + | 12 | AC-385 | 2275 | 2905 | 3535 |
| chr3 | 137610467 | 137610490 | + | 23 | AC-386 | 2276 | 2906 | 3536 |
| chr3 | 142964237 | 142964267 | − | 30 | AC-387 | 2277 | 2907 | 3537 |
| chr3 | 150745240 | 150745278 | + | 38 | AC-388 | 2278 | 2908 | 3538 |
| chr3 | 157087700 | 157087720 | − | 20 | AC-389 | 2279 | 2909 | 3539 |
| chr3 | 175262575 | 175262609 | − | 34 | AC-390 | 2280 | 2910 | 3540 |
| chr3 | 175342505 | 175342533 | − | 28 | AC-391 | 2281 | 2911 | 3541 |
| chr3 | 179426975 | 179426987 | + | 12 | AC-392 | 2282 | 2912 | 3542 |
| chr3 | 186964274 | 186964286 | + | 12 | AC-393 | 2283 | 2913 | 3543 |
| chr3 | 188811351 | 188811385 | + | 34 | AC-394 | 2284 | 2914 | 3544 |
| chr3 | 188819027 | 188819071 | − | 44 | AC-395 | 2285 | 2915 | 3545 |
| chr3 | 189281542 | 189281554 | − | 12 | AC-396 | 2286 | 2916 | 3546 |
| chr4 | 3218933 | 3218947 | − | 14 | AC-397 | 2287 | 2917 | 3547 |
| chr4 | 10894438 | 10894474 | − | 36 | AC-398 | 2288 | 2918 | 3548 |
| chr4 | 13899844 | 13899895 | + | 51 | AC-399 | 2289 | 2919 | 3549 |
| chr4 | 25007578 | 25007626 | − | 48 | AC-400 | 2290 | 2920 | 3550 |
| chr4 | 25957671 | 25957730 | − | 59 | AC-401 | 2291 | 2921 | 3551 |
| chr4 | 31671125 | 31671145 | + | 20 | AC-402 | 2292 | 2922 | 3552 |
| chr4 | 33960900 | 33960938 | + | 38 | AC-403 | 2293 | 2923 | 3553 |
| chr4 | 36654887 | 36654930 | + | 43 | AC-404 | 2294 | 2924 | 3554 |
| chr4 | 38508529 | 38508567 | + | 38 | AC-405 | 2295 | 2925 | 3555 |
| chr4 | 44354216 | 44354229 | − | 13 | AC-406 | 2296 | 2926 | 3556 |
| chr4 | 45865788 | 45865800 | − | 12 | AC-407 | 2297 | 2927 | 3557 |
| chr4 | 65672409 | 65672447 | + | 38 | AC-408 | 2298 | 2928 | 3558 |
| chr4 | 65871252 | 65871272 | + | 20 | AC-409 | 2299 | 2929 | 3559 |
| chr4 | 76888192 | 76888240 | + | 48 | AC-410 | 2300 | 2930 | 3560 |
| chr4 | 81226274 | 81226297 | − | 23 | AC-411 | 2301 | 2931 | 3561 |
| chr4 | 81646328 | 81646375 | − | 47 | AC-412 | 2302 | 2932 | 3562 |
| chr4 | 83682203 | 83682245 | + | 42 | AC-413 | 2303 | 2933 | 3563 |
| chr4 | 84489018 | 84489064 | − | 46 | AC-414 | 2304 | 2934 | 3564 |
| chr4 | 90107729 | 90107760 | − | 31 | AC-415 | 2305 | 2935 | 3565 |
| chr4 | 102052609 | 102052623 | + | 14 | AC-416 | 2306 | 2936 | 3566 |
| chr4 | 104894587 | 104894612 | + | 25 | AC-417 | 2307 | 2937 | 3567 |
| chr4 | 108540472 | 108540514 | − | 42 | AC-418 | 2308 | 2938 | 3568 |
| chr4 | 109265518 | 109265568 | − | 50 | AC-419 | 2309 | 2939 | 3569 |
| chr4 | 116786381 | 116786427 | − | 46 | AC-420 | 2310 | 2940 | 3570 |
| chr4 | 128389652 | 128389698 | − | 46 | AC-421 | 2311 | 2941 | 3571 |
| chr4 | 137206883 | 137206895 | − | 12 | AC-422 | 2312 | 2942 | 3572 |
| chr4 | 145177942 | 145177955 | + | 13 | AC-423 | 2313 | 2943 | 3573 |
| chr4 | 145805125 | 145805161 | − | 36 | AC-424 | 2314 | 2944 | 3574 |
| chr4 | 145856682 | 145856724 | + | 42 | AC-425 | 2315 | 2945 | 3575 |
| chr4 | 148412821 | 148412842 | + | 21 | AC-426 | 2316 | 2946 | 3576 |
| chr4 | 151509759 | 151509788 | − | 29 | AC-427 | 2317 | 2947 | 3577 |
| chr4 | 154554344 | 154554377 | − | 33 | AC-428 | 2318 | 2948 | 3578 |
| chr4 | 157867966 | 157867985 | + | 19 | AC-429 | 2319 | 2949 | 3579 |
| chr4 | 158768315 | 158768354 | − | 39 | AC-430 | 2320 | 2950 | 3580 |
| chr4 | 171948962 | 171948987 | + | 25 | AC-431 | 2321 | 2951 | 3581 |
| chr4 | 173523993 | 173524024 | + | 31 | AC-432 | 2322 | 2952 | 3582 |
| chr4 | 181073679 | 181073716 | − | 37 | AC-433 | 2323 | 2953 | 3583 |
| chr5 | 914720 | 914741 | − | 21 | AC-434 | 2324 | 2954 | 3584 |
| chr5 | 2997205 | 2997225 | − | 20 | AC-435 | 2325 | 2955 | 3585 |
| chr5 | 5725644 | 5725674 | − | 30 | AC-436 | 2326 | 2956 | 3586 |
| chr5 | 8532870 | 8532882 | + | 12 | AC-437 | 2327 | 2957 | 3587 |
| chr5 | 9917710 | 9917726 | + | 16 | AC-438 | 2328 | 2958 | 3588 |
| chr5 | 16629570 | 16629617 | − | 47 | AC-439 | 2329 | 2959 | 3589 |
| chr5 | 22869460 | 22869491 | + | 31 | AC-440 | 2330 | 2960 | 3590 |
| chr5 | 36789014 | 36789039 | − | 25 | AC-441 | 2331 | 2961 | 3591 |
| chr5 | 38131972 | 38131989 | + | 17 | AC-442 | 2332 | 2962 | 3592 |
| chr5 | 53824869 | 53824898 | − | 29 | AC-443 | 2333 | 2963 | 3593 |
| chr5 | 59205653 | 59205699 | + | 46 | AC-444 | 2334 | 2964 | 3594 |
| chr5 | 73279446 | 73279458 | − | 12 | AC-445 | 2335 | 2965 | 3595 |
| chr5 | 74060374 | 74060387 | − | 13 | AC-446 | 2336 | 2966 | 3596 |
| chr5 | 77971951 | 77971963 | + | 12 | AC-447 | 2337 | 2967 | 3597 |
| chr5 | 78018671 | 78018701 | + | 30 | AC-448 | 2338 | 2968 | 3598 |
| chr5 | 89533569 | 89533581 | − | 12 | AC-449 | 2339 | 2969 | 3599 |
| chr5 | 100039934 | 100039949 | + | 15 | AC-450 | 2340 | 2970 | 3600 |
| chr5 | 102630348 | 102630361 | + | 13 | AC-451 | 2341 | 2971 | 3601 |
| chr5 | 105795040 | 105795087 | + | 47 | AC-452 | 2342 | 2972 | 3602 |
| chr5 | 106381874 | 106381887 | − | 13 | AC-453 | 2343 | 2973 | 3603 |
| chr5 | 108628093 | 108628109 | − | 16 | AC-454 | 2344 | 2974 | 3604 |
| chr5 | 110624008 | 110624020 | − | 12 | AC-455 | 2345 | 2975 | 3605 |
| chr5 | 116438053 | 116438073 | + | 20 | AC-456 | 2346 | 2976 | 3606 |
| chr5 | 116474278 | 116474310 | + | 32 | AC-457 | 2347 | 2977 | 3607 |
| chr5 | 135451181 | 135451193 | + | 12 | AC-458 | 2348 | 2978 | 3608 |
| chr5 | 137480303 | 137480344 | + | 41 | AC-459 | 2349 | 2979 | 3609 |
| chr5 | 139159689 | 139159701 | − | 12 | AC-460 | 2350 | 2980 | 3610 |
| chr5 | 144748341 | 144748387 | − | 46 | AC-461 | 2351 | 2981 | 3611 |
| chr5 | 146585259 | 146585302 | + | 43 | AC-462 | 2352 | 2982 | 3612 |
| chr5 | 150161415 | 150161428 | + | 13 | AC-463 | 2353 | 2983 | 3613 |
| chr5 | 154587485 | 154587506 | + | 21 | AC-464 | 2354 | 2984 | 3614 |
| chr5 | 157035448 | 157035463 | + | 15 | AC-465 | 2355 | 2985 | 3615 |
| chr5 | 158858373 | 158858386 | + | 13 | AC-466 | 2356 | 2986 | 3616 |
| chr5 | 161359440 | 161359467 | + | 27 | AC-467 | 2357 | 2987 | 3617 |
| chr5 | 165296411 | 165296424 | + | 13 | AC-468 | 2358 | 2988 | 3618 |
| chr5 | 173166004 | 173166037 | + | 33 | AC-469 | 2359 | 2989 | 3619 |
| chr5 | 174049445 | 174049463 | + | 18 | AC-470 | 2360 | 2990 | 3620 |
| chr5 | 176808837 | 176808873 | + | 36 | AC-471 | 2361 | 2991 | 3621 |
| chr6 | 11615873 | 11615896 | + | 23 | AC-472 | 2362 | 2992 | 3622 |
| chr6 | 18665733 | 18665746 | − | 13 | AC-473 | 2363 | 2993 | 3623 |
| chr6 | 21557228 | 21557240 | + | 12 | AC-474 | 2364 | 2994 | 3624 |
| chr6 | 22685540 | 22685552 | − | 12 | AC-475 | 2365 | 2995 | 3625 |
| chr6 | 25831656 | 25831668 | + | 12 | AC-476 | 2366 | 2996 | 3626 |
| chr6 | 26326576 | 26326591 | + | 15 | AC-477 | 2367 | 2997 | 3627 |
| chr6 | 35958717 | 35958730 | − | 13 | AC-478 | 2368 | 2998 | 3628 |
| chr6 | 40218844 | 40218856 | + | 12 | AC-479 | 2369 | 2999 | 3629 |
| chr6 | 43260942 | 43260958 | + | 16 | AC-480 | 2370 | 3000 | 3630 |
| chr6 | 43992143 | 43992155 | + | 12 | AC-481 | 2371 | 3001 | 3631 |
| chr6 | 45535992 | 45536004 | + | 12 | AC-482 | 2372 | 3002 | 3632 |
| chr6 | 46285124 | 46285136 | + | 12 | AC-483 | 2373 | 3003 | 3633 |
| chr6 | 50724763 | 50724781 | − | 18 | AC-484 | 2374 | 3004 | 3634 |
| chr6 | 52412748 | 52412760 | + | 12 | AC-485 | 2375 | 3005 | 3635 |
| chr6 | 67905996 | 67906016 | + | 20 | AC-486 | 2376 | 3006 | 3636 |
| chr6 | 71013985 | 71014013 | − | 28 | AC-487 | 2377 | 3007 | 3637 |
| chr6 | 82404255 | 82404267 | − | 12 | AC-488 | 2378 | 3008 | 3638 |
| chr6 | 84912911 | 84912931 | − | 20 | AC-489 | 2379 | 3009 | 3639 |
| chr6 | 90979513 | 90979551 | + | 38 | AC-490 | 2380 | 3010 | 3640 |
| chr6 | 93367616 | 93367631 | + | 15 | AC-491 | 2381 | 3011 | 3641 |
| chr6 | 100441435 | 100441449 | + | 14 | AC-492 | 2382 | 3012 | 3642 |
| chr6 | 101697340 | 101697382 | − | 42 | AC-493 | 2383 | 3013 | 3643 |
| chr6 | 108188502 | 108188552 | + | 50 | AC-494 | 2384 | 3014 | 3644 |
| chr6 | 109342833 | 109342859 | − | 26 | AC-495 | 2385 | 3015 | 3645 |
| chr6 | 112808037 | 112808055 | − | 18 | AC-496 | 2386 | 3016 | 3646 |
| chr6 | 117686852 | 117686899 | − | 47 | AC-497 | 2387 | 3017 | 3647 |
| chr6 | 124392523 | 124392536 | − | 13 | AC-498 | 2388 | 3018 | 3648 |
| chr6 | 124611705 | 124611718 | − | 13 | AC-499 | 2389 | 3019 | 3649 |
| chr6 | 131100960 | 131101006 | + | 46 | AC-500 | 2390 | 3020 | 3650 |
| chr6 | 142306681 | 142306694 | − | 13 | AC-501 | 2391 | 3021 | 3651 |
| chr6 | 150757561 | 150757580 | − | 19 | AC-502 | 2392 | 3022 | 3652 |
| chr6 | 155521023 | 155521057 | + | 34 | AC-503 | 2393 | 3023 | 3653 |
| chr6 | 156494300 | 156494337 | − | 37 | AC-504 | 2394 | 3024 | 3654 |
| chr6 | 162710374 | 162710415 | + | 41 | AC-505 | 2395 | 3025 | 3655 |
| chr6 | 164964828 | 164964849 | + | 21 | AC-506 | 2396 | 3026 | 3656 |
| chr7 | 2640392 | 2640404 | − | 12 | AC-507 | 2397 | 3027 | 3657 |
| chr7 | 6659561 | 6659575 | + | 14 | AC-508 | 2398 | 3028 | 3658 |
| chr7 | 10278035 | 10278047 | + | 12 | AC-509 | 2399 | 3029 | 3659 |
| chr7 | 11669971 | 11669992 | − | 21 | AC-510 | 2400 | 3030 | 3660 |
| chr7 | 15816101 | 15816116 | − | 15 | AC-511 | 2401 | 3031 | 3661 |
| chr7 | 18499080 | 18499103 | − | 23 | AC-512 | 2402 | 3032 | 3662 |
| chr7 | 27436646 | 27436658 | + | 12 | AC-513 | 2403 | 3033 | 3663 |
| chr7 | 31321320 | 31321356 | − | 36 | AC-514 | 2404 | 3034 | 3664 |
| chr7 | 33313036 | 33313065 | − | 29 | AC-515 | 2405 | 3035 | 3665 |
| chr7 | 35730091 | 35730107 | + | 16 | AC-516 | 2406 | 3036 | 3666 |
| chr7 | 36126622 | 36126646 | − | 24 | AC-517 | 2407 | 3037 | 3667 |
| chr7 | 41046876 | 41046888 | − | 12 | AC-518 | 2408 | 3038 | 3668 |
| chr7 | 49423670 | 49423683 | − | 13 | AC-519 | 2409 | 3039 | 3669 |
| chr7 | 53147640 | 53147653 | + | 13 | AC-520 | 2410 | 3040 | 3670 |
| chr7 | 53336267 | 53336300 | + | 33 | AC-521 | 2411 | 3041 | 3671 |
| chr7 | 54281367 | 54281380 | + | 13 | AC-522 | 2412 | 3042 | 3672 |
| chr7 | 66087243 | 66087283 | − | 40 | AC-523 | 2413 | 3043 | 3673 |
| chr7 | 68187087 | 68187120 | + | 33 | AC-524 | 2414 | 3044 | 3674 |
| chr7 | 69931112 | 69931148 | + | 36 | AC-525 | 2415 | 3045 | 3675 |
| chr7 | 70640572 | 70640594 | − | 22 | AC-526 | 2416 | 3046 | 3676 |
| chr7 | 74404520 | 74404532 | + | 12 | AC-527 | 2417 | 3047 | 3677 |
| chr7 | 74404793 | 74404805 | + | 12 | AC-528 | 2418 | 3048 | 3678 |
| chr7 | 78124681 | 78124698 | + | 17 | AC-529 | 2419 | 3049 | 3679 |
| chr7 | 79113811 | 79113837 | + | 26 | AC-530 | 2420 | 3050 | 3680 |
| chr7 | 89607949 | 89607976 | − | 27 | AC-531 | 2421 | 3051 | 3681 |
| chr7 | 104249356 | 104249387 | − | 31 | AC-532 | 2422 | 3052 | 3682 |
| chr7 | 111008579 | 111008595 | + | 16 | AC-533 | 2423 | 3053 | 3683 |
| chr7 | 115060128 | 115060142 | + | 14 | AC-534 | 2424 | 3054 | 3684 |
| chr7 | 117862056 | 117862075 | + | 19 | AC-535 | 2425 | 3055 | 3685 |
| chr7 | 119596454 | 119596491 | − | 37 | AC-536 | 2426 | 3056 | 3686 |
| chr7 | 121388235 | 121388261 | + | 26 | AC-537 | 2427 | 3057 | 3687 |
| chr7 | 124788365 | 124788396 | − | 31 | AC-538 | 2428 | 3058 | 3688 |
| chr7 | 125351681 | 125351726 | − | 45 | AC-539 | 2429 | 3059 | 3689 |
| chr7 | 135950348 | 135950363 | − | 15 | AC-540 | 2430 | 3060 | 3690 |
| chr7 | 137046728 | 137046764 | + | 36 | AC-541 | 2431 | 3061 | 3691 |
| chr7 | 137545482 | 137545496 | + | 14 | AC-542 | 2432 | 3062 | 3692 |
| chr7 | 137843756 | 137843796 | + | 40 | AC-543 | 2433 | 3063 | 3693 |
| chr7 | 145093880 | 145093901 | − | 21 | AC-544 | 2434 | 3064 | 3694 |
| chr7 | 151812948 | 151812961 | + | 13 | AC-545 | 2435 | 3065 | 3695 |
| chr7 | 152193684 | 152193700 | + | 16 | AC-546 | 2436 | 3066 | 3696 |
| chr7 | 157486364 | 157486382 | − | 18 | AC-547 | 2437 | 3067 | 3697 |
| chr8 | 2877350 | 2877369 | − | 19 | AC-548 | 2438 | 3068 | 3698 |
| chr8 | 5916479 | 5916522 | + | 43 | AC-549 | 2439 | 3069 | 3699 |
| chr8 | 16833227 | 16833239 | + | 12 | AC-550 | 2440 | 3070 | 3700 |
| chr8 | 17096955 | 17096997 | − | 42 | AC-551 | 2441 | 3071 | 3701 |
| chr8 | 18673202 | 18673219 | + | 17 | AC-552 | 2442 | 3072 | 3702 |
| chr8 | 22575902 | 22575933 | − | 31 | AC-553 | 2443 | 3073 | 3703 |
| chr8 | 29900159 | 29900193 | − | 34 | AC-554 | 2444 | 3074 | 3704 |
| chr8 | 37808558 | 37808588 | − | 30 | AC-555 | 2445 | 3075 | 3705 |
| chr8 | 56677789 | 56677815 | − | 26 | AC-556 | 2446 | 3076 | 3706 |
| chr8 | 60504361 | 60504373 | + | 12 | AC-557 | 2447 | 3077 | 3707 |
| chr8 | 64445861 | 64445874 | − | 13 | AC-558 | 2448 | 3078 | 3708 |
| chr8 | 69834086 | 69834129 | + | 43 | AC-559 | 2449 | 3079 | 3709 |
| chr8 | 69834735 | 69834780 | + | 45 | AC-560 | 2450 | 3080 | 3710 |
| chr8 | 72983955 | 72983989 | + | 34 | AC-561 | 2451 | 3081 | 3711 |
| chr8 | 74296019 | 74296045 | + | 26 | AC-562 | 2452 | 3082 | 3712 |
| chr8 | 99657470 | 99657495 | − | 25 | AC-563 | 2453 | 3083 | 3713 |
| chr8 | 100292435 | 100292469 | − | 34 | AC-564 | 2454 | 3084 | 3714 |
| chr8 | 101967840 | 101967867 | + | 27 | AC-565 | 2455 | 3085 | 3715 |
| chr8 | 102463303 | 102463317 | − | 14 | AC-566 | 2456 | 3086 | 3716 |
| chr8 | 108700130 | 108700168 | − | 38 | AC-567 | 2457 | 3087 | 3717 |
| chr8 | 108923709 | 108923753 | − | 44 | AC-568 | 2458 | 3088 | 3718 |
| chr8 | 111782619 | 111782639 | + | 20 | AC-569 | 2459 | 3089 | 3719 |
| chr8 | 113897306 | 113897345 | + | 39 | AC-570 | 2460 | 3090 | 3720 |
| chr8 | 114293551 | 114293563 | − | 12 | AC-571 | 2461 | 3091 | 3721 |
| chr8 | 115306130 | 115306143 | + | 13 | AC-572 | 2462 | 3092 | 3722 |
| chr8 | 115546581 | 115546612 | + | 31 | AC-573 | 2463 | 3093 | 3723 |
| chr9 | 3172768 | 3172798 | + | 30 | AC-574 | 2464 | 3094 | 3724 |
| chr9 | 7622615 | 7622629 | − | 14 | AC-575 | 2465 | 3095 | 3725 |
| chr9 | 7843389 | 7843402 | + | 13 | AC-576 | 2466 | 3096 | 3726 |
| chr9 | 16276520 | 16276534 | + | 14 | AC-577 | 2467 | 3097 | 3727 |
| chr9 | 24072795 | 24072840 | − | 45 | AC-578 | 2468 | 3098 | 3728 |
| chr9 | 31036268 | 31036292 | + | 24 | AC-579 | 2469 | 3099 | 3729 |
| chr9 | 32967307 | 32967357 | + | 50 | AC-580 | 2470 | 3100 | 3730 |
| chr9 | 36644209 | 36644252 | − | 43 | AC-581 | 2471 | 3101 | 3731 |
| chr9 | 36814754 | 36814766 | − | 12 | AC-582 | 2472 | 3102 | 3732 |
| chr9 | 68529164 | 68529211 | − | 47 | AC-583 | 2473 | 3103 | 3733 |
| chr9 | 70118297 | 70118348 | + | 51 | AC-584 | 2474 | 3104 | 3734 |
| chr9 | 70120254 | 70120267 | + | 13 | AC-585 | 2475 | 3105 | 3735 |
| chr9 | 75599977 | 75600015 | + | 38 | AC-586 | 2476 | 3106 | 3736 |
| chr9 | 79333729 | 79333742 | − | 13 | AC-587 | 2477 | 3107 | 3737 |
| chr9 | 89483736 | 89483748 | − | 12 | AC-588 | 2478 | 3108 | 3738 |
| chr9 | 91239745 | 91239757 | + | 12 | AC-589 | 2479 | 3109 | 3739 |
| chr9 | 94821970 | 94822012 | + | 42 | AC-590 | 2480 | 3110 | 3740 |
| chr9 | 102201485 | 102201510 | − | 25 | AC-591 | 2481 | 3111 | 3741 |
| chr9 | 105161311 | 105161342 | + | 31 | AC-592 | 2482 | 3112 | 3742 |
| chr9 | 107603638 | 107603661 | − | 23 | AC-593 | 2483 | 3113 | 3743 |
| chr9 | 114010999 | 114011011 | + | 12 | AC-594 | 2484 | 3114 | 3744 |
| chr9 | 121479711 | 121479723 | + | 12 | AC-595 | 2485 | 3115 | 3745 |
| chr9 | 122676111 | 122676139 | − | 28 | AC-596 | 2486 | 3116 | 3746 |
| chr9 | 125815693 | 125815718 | − | 25 | AC-597 | 2487 | 3117 | 3747 |
| chr9 | 127086123 | 127086135 | + | 12 | AC-598 | 2488 | 3118 | 3748 |
| chr9 | 130789525 | 130789547 | + | 22 | AC-599 | 2489 | 3119 | 3749 |
| chr9 | 132840406 | 132840448 | + | 42 | AC-600 | 2490 | 3120 | 3750 |
| chr9 | 135077150 | 135077168 | + | 18 | AC-601 | 2491 | 3121 | 3751 |
| chrX | 3603350 | 3603362 | + | 12 | AC-602 | 2492 | 3122 | 3752 |
| chrX | 11068536 | 11068574 | − | 38 | AC-603 | 2493 | 3123 | 3753 |
| chrX | 11630010 | 11630030 | − | 20 | AC-604 | 2494 | 3124 | 3754 |
| chrX | 11663768 | 11663782 | + | 14 | AC-605 | 2495 | 3125 | 3755 |
| chrX | 16007548 | 16007583 | − | 35 | AC-606 | 2496 | 3126 | 3756 |
| chrX | 16776434 | 16776474 | − | 40 | AC-607 | 2497 | 3127 | 3757 |
| chrX | 16864153 | 16864168 | + | 15 | AC-608 | 2498 | 3128 | 3758 |
| chrX | 29069628 | 29069670 | + | 42 | AC-609 | 2499 | 3129 | 3759 |
| chrX | 30746990 | 30747008 | − | 18 | AC-610 | 2500 | 3130 | 3760 |
| chrX | 40167735 | 40167747 | + | 12 | AC-611 | 2501 | 3131 | 3761 |
| chrX | 42183785 | 42183833 | − | 48 | AC-612 | 2502 | 3132 | 3762 |
| chrX | 45696781 | 45696803 | − | 22 | AC-613 | 2503 | 3133 | 3763 |
| chrX | 48471856 | 48471869 | + | 13 | AC-614 | 2504 | 3134 | 3764 |
| chrX | 72429741 | 72429754 | − | 13 | AC-615 | 2505 | 3135 | 3765 |
| chrX | 74457676 | 74457689 | + | 13 | AC-616 | 2506 | 3136 | 3766 |
| chrX | 78121402 | 78121425 | − | 23 | AC-617 | 2507 | 3137 | 3767 |
| chrX | 82818338 | 82818351 | − | 13 | AC-618 | 2508 | 3138 | 3768 |
| chrX | 100561901 | 100561918 | + | 17 | AC-619 | 2509 | 3139 | 3769 |
| chrX | 106955518 | 106955541 | + | 23 | AC-620 | 2510 | 3140 | 3770 |
| chrX | 110947528 | 110947542 | + | 14 | AC-621 | 2511 | 3141 | 3771 |
| chrX | 131203326 | 131203338 | − | 12 | AC-622 | 2512 | 3142 | 3772 |
| chrX | 136311394 | 136311430 | + | 36 | AC-623 | 2513 | 3143 | 3773 |
| chrX | 137626789 | 137626814 | − | 25 | AC-624 | 2514 | 3144 | 3774 |
| chrX | 141714377 | 141714400 | + | 23 | AC-625 | 2515 | 3145 | 3775 |
| chrX | 142998165 | 142998193 | − | 28 | AC-626 | 2516 | 3146 | 3776 |
| chrX | 146107858 | 146107870 | − | 12 | AC-627 | 2517 | 3147 | 3777 |
| chrX | 147756133 | 147756154 | + | 21 | AC-628 | 2518 | 3148 | 3778 |
| chrX | 151615298 | 151615311 | + | 13 | AC-629 | 2519 | 3149 | 3779 |
| chrX | 154675789 | 154675801 | + | 12 | AC-630 | 2520 | 3150 | 3780 |

### Example 3B: Construction of Library for Enrichment Panel

[0536] As shown in FIG. 11, DNA fragmentase is used to fragment one (1) microgram of genomic DNA to a target size of 300 bp. After end-polishing and A-tailing, the double-stranded DNA fragments is adapted with mutation-resistant fork-tailed primers augmented with a varietal tag (see Example 5). The adapted DNA fragments are then denatured and captured with either: (i) the C-MS panel of 630 loci or (ii) the AC-MS panel of 630 loci. For each panel, the DNA strand in which the microsatellite is C or AC is targeted. Sometimes this is the reference strand and sometimes the reverse complement of the reference strand.

[0537] The panels are comprised of 60 bp oligonucleotides complementary to the targeted flank sequences with a biotin covalently attached at the 5′ end. After hybridization capture of the target DNA, capture oligos are pulled down with streptavidin along with the hybridized target DNA. After release from the capture reagents, the templates are subjected to partial bisulfite conversion, as described above. Then the mutated target molecules are linearly amplified from the mutation resistant handle for 20 cycles, adding a second unique varietal tag to each linear copy and one of the two sequencing primers (read 1 primer, P5). Double-stranded DNA fragments are then generated by another linear amplification including the second sequencing primer (read 2 primer, P7). This is followed by size selection for the length range from 300 bp to 500 bp. This is then followed by 12 rounds of exponential amplification to make the final sequencing libraries.

### Example 3C: Analysis of Sequencing Reads and Method Performance

[0538] After sequencing, the resultant reads were analyzed for proper structure. From reads with the proper structure, the varietal tags and universal primer regions are extracted and then the genomic segments are mapped to the genome. Mapping was performed by first fully converting the genomic segments from each read-pair: read 1 is converted G to A and read 2 is converted C to T. This is the expected pattern of conversion from the incorporation of the sequencing primers since the linear amplification that adds the P5 primer primes off of the C->U converted template. Mapping the opposite conversion was tested and 97% of reads have a higher mapping score with read 1 converted G->A, as expected.

[0539] The inserts are then mapped to two possible genomes, one where every C is converted to T (ref_CT) and one where every G is converted to an A (ref_GA), corresponding to whether the mutated template derived from the reference strand (ref_CT) or from the reverse complement (ref_GA). The mapping with the best quality score is selected.

[0540] The proportion of mapped reads that map to the target regions is then examined. While the target accounts for only 0.002% of the genome, after enrichment 43% and 33% of mapped reads fall within the target region for C-MS and AC-MS respectively. It was also noted that coverage over target loci appears relatively uniform. (See FIG. 11)

[0541] As described above, the capture oligos are stranded, designed to be complementary to strand containing the C or AC repeat. The C and AC targets are divided by those where the C-containing repeat is on the reference strand (ref) and those where the C-containing repeat is on the complement of the reference strand (ref_complement). It was found that 99.97% of the ref reads map to the ref_CT genome and 99.98% of the ref_complement reads map the ref_A genome.

### Example 3D: Other Variations on Enrichment Library Protocol

[0542] In another realization of this process, mutagenesis and/or amplification is performed before capture, using redundancy (or not) to reduce error.

[0543] In another realization of this process, the first-round copies are partially mutagenized rather than the initial templates.

[0544] In another realization of this process, barcoded samples are pooled prior to enrichment.

[0545] In another realization of this process, linear amplification with a mixture of dNTP containing methyl-dCTP is performed before capture, followed by complete conversion of unmethylated cytosines, such that the first copies are mutagenized. Template redundancy may or may not be used to reduce error.

[0546] In another realization of this process, the library is enriched twice to improve on-target rates.

### Example 4—Whole Genome Library from Mutagenized Templates

[0547] To determine microsatellite lengths in all C containing microsatellites across the genome, a whole genome sequencing (WGS) library is generated that has undergone bisulfite mutagenesis, with varietal tags added to the initial templates and independently to the first copies. This protocol is highly similar to that shown in FIG. 11, with step 3 (panel enrichment) skipped.

[0548] The protocol for this example has the following steps:
[0549] (a) fragmentation of genomic DNA to a target size of 300 bp;
[0550] (b) end-polishing and A-tailing;
[0551] (c) adapting the double-stranded DNA fragments with mutation-resistant fork-tailed primers augmented with a varietal tag;
[0552] (d) partial mutagenesis with bisulfite treatment;
[0553] (e) linear amplification for 20 cycles, adding a second unique varietal tag to each linear copy and one of the two sequencing primers (read 1 primer, P5);
[0554] (f) one round of linear amplification to make double-stranded DNA fragments including the second sequencing primer (read 2 primer, P7);
[0555] (g) size selection for the length range from 300 bp to 500 bp;
[0556] (h) exponential amplification for 12 rounds to make the final sequencing libraries.

[0557] There are many variations that can be incorporated into this example. In particular, variation in the number of rounds of linear and exponential amplification; the precise design of the fish tail primers; and so on.

### Example 5—Applications of Measuring Microsatellite Length

### Example 5A: Determining Cancer Signature

[0558] In this example, a cancer microsatellite length signature is when a cancer has microsatellite length variation from the known germline of the host. To determine the cancer signature, the protocols described herein are applied to DNA extracted from a biopsy of a cancer, whether primary or metastatic, and to DNA extracted from the blood cells, or some other patient-derived sample, that represents the germline of that patient. The signature of the cancer is then the statistically robust differences between the cancer and normal sample over all the loci that have been examined. This can be done over the entire genome, or by using panels to enrich certain loci.

[0559] It is desirable to know the signature from the cancer for two main reasons. First, once known, the signature will help one follow the cancer load at presentation and over time (see Example 5D). It could help identify a new lesion as metastatic, and whether the cancer has spread to the lymph nodes or surgical margins. The signature may also provide a measure of proportion of DNA in a biopsy that is cancer, that is, the cancer cellularity. If the cancer is sampled from more than one location, the signature at each location will provide evidence of genomic heterogeneity and spread, and for residual disease at the surgical margins.

[0560] Second, the degree of MSLV will help determine if the patient has microsatellite instability (MSI). MSI is a useful determination, as it predicts outcome and guides therapeutic options. Unlike other methods of evaluating MSI, the methods described herein should provide a quantitative degree of instability, which may have clinical utility.

[0561] See Example 7 and FIG. 15 for further illustration on this topic.

### Example 5B: Early Detection of Cancer by Analysis Cell Free DNA in Blood

[0562] It is of value to detect a neoplasm at the earliest possible time, so action taken before a life threatening malignancy emerges. The need is especially critical in persons with a prior history of cancer, a family history of cancer, persons exposed to carcinogens, for example smokers, and in the elderly. Cancers release DNA and cells into the blood stream, and MSLV can be used to detect these at the earliest possible times. A test can be based on circulating tumor cells (ct-cells) or cell-free DNA (cf-DNA) (Georgiadis, A. et al., 2019; Abbosh, C. et al., 2017; Coombes, R. C. et al., 2019; Cristiano, S. et al., 2019; Garcia-Murillas, I. et al., 2015; Phallen, J. et al., 2017; Tie, J. et al., 2016). In this example the latter is considered because most studies, including the inventors' own, report higher signal in cf-DNA than in ct-cells. Other patient specimens could be tested, such as urine, fecal matter or sputum.

[0563] Because a prior signature is not known, it is desirable to survey many microsatellites. The analysis is performed on a panel of microsatellite loci, N, as described in FIG. 11. The presence of C in the microsatellite enables one to perform partial bisulfite mutagenesis which targets that nucleotide. N=10\hat{ }3 would likely suffice, but it will be determined empirically over time what values of N are the most cost effective, which loci might be the most valuable, and how many variant loci are needed for confident detection of neoplastic growth.

[0564] Because microsatellite lengths are so variable, any significant new growth in the body is likely to have some loci with a new MS length, differing from the germline-inherited lengths. Cell death would result in the release of such DNA into the circulation, although in small amounts. Provided a detection method is used with an error rate below the concentration of these substances in the cf-DNA, they could be detected. The methods described herein based on partial bisulfite mutagenesis of a template, further requiring at least two linear copies of that template that agree, would have an error estimated to be on the order of one part per ten million, even lower with three linear copies, and far below the needed error rate for MSLV detection of rare molecules in cf-DNA.

[0565] Any result would need to be considered in the context of normal variation. Some amount of variation beyond the germline might be common in healthy persons. For example, somatic clones probably arise during development that would be characterized by somatic variation at some loci characteristic for an adult tissue. As regeneration happens throughout life, this tissue specific signature for healthy persons may vary. When those cells die, their DNA would also appear in cf-DNA. So, for example, someone with active hepatitis, might be releasing DNA from hepatic cells, and this might be detectable by the methods described herein. Thus, each person will have a baseline of low frequency length variants, but one which might vary depending on their condition and age.

[0566] Ideally, a person at risk should be monitored over time. Any detection of a set of loci with new lengths would be re-examined on a repeat assay. An increase in the frequency of any of them would be an alarming signal, evidence of a clone which is expanding. This would signal the need for further actions, such as imaging or additional blood tests. Also, one would like to distinguish signals that emanate from an expanding new growth from the signal that might come from the blood cells themselves, which are probably in a constant state of expansion and replacement, for example secondary to inflammation and infections. Thus, in addition to the dynamic monitoring of MSLV, one would look for MSLV in the blood cells over the same panel of loci. See Example 8 and FIG. 16 for further illustration on this topic.

### Example 5C: Detecting Cancer in Exploratory Biopsies

[0567] A common clinical problem is to determine from a biopsy whether a person has a malignant growth and requires further treatment. This occurs for examples when examining a skin growth, biopsies of polyps during colonoscopy, or while searching for prostate cancer in core biopsies. In these cases, signature is not initially known, but one can reasonably expect the proportion of malignant cells would be high, as in the first application example. In addition to finding the proportion of a sample that is new growth, the signature of the new growth is thereby determined; the degree of MSI (microsatellite instability) is determined; and by multiple site biopsies and examination of signature in blood one can also measure tumor heterogeneity and spread.

### Example 5D: Measuring Cancer Load by Analysis of Cells and Cell Free DNA in Blood

[0568] Solid cancers leave traces in the blood (in the form of cell-free DNA and cells) and other samples such as cerebral-spinal fluid, urine, sputum and fecal matter that can be monitored without signature. Assays without signature require that large numbers of loci are assayed, because of the need to detect new emergent resistant cancer clones.

### Example 5E: Monitoring Residual Cancer

[0569] One clear application of the method is to monitoring residual disease in the case of leukemia. In this instance sample depth should be very high, on the order of 10\hat{ }6, to be able to detect very low levels of residual disease. Thus, for this application, signature would make the assays affordable, as the number of loci could then be reduced to 10 or 20 known loci variants in the presenting leukemia.

[0570] Because new leukemic clones can become chemo-resistant, and such cells might have new MSLV not detected at presentation, the broader screen, higher with higher number of loci and lower depth, such as described in application Example 1, might also be warranted.

### Example 5F: Monitoring Inflammatory Responses

[0571] The inflammatory response is characterized by the recruitment of cells of various lineages from the lymph nodes and bone marrow into the blood and to the site of inflammation. Often the cells are recruited from pre-existing somatic clones, and further clonal proliferation occurs. During this process the clonal expansions may generate new somatic variants of MSL, which can then be used to characterize that inflammatory response, and to detect its recurrence. For example, someone infected by a specific pathogen or having an autoimmune flare-up might mount an immune response characterized by the appearance in the blood of a specific MSLV spectra. The reappearance of that spectra again, perhaps years later, might indicate a similar inflammatory process has been triggered.

### Example 5G: Assessment of Male Sterility

[0572] Sometimes the germ line in males becomes dominated by a mutant clone, or a few mutant clones, especially as males age. This reduces fertility and can be associated with the emergence of de novo genetic disorders. This would be discoverable by the application of the method described herein to sperm DNA. In particular the abundance of a variant MS or a set of abundant MS not present in the patient's blood, could signal this as a cause. This would have application in the testing of sperm donors.

### Example 5H: Other Uses

[0573] Other possible applications are briefly listed here. Microsatellite length variation accurately and quantitatively measured, can be used to decipher the composition of complex populations, which is useful in agricultural and animal breeding. For the same reason, there are forensic applications in human populations, where individuals in large populations must be identified or traced. Other possible uses are testing pharmacologic and cosmetic compounds for their mutagenic properties.

### Example 6—Distinguishing Mixtures of Populations with Different Microsatellite Lengths

[0574] In this example (FIG. 14) the ability to distinguish DNA from mixed population of cells is illustrated, with and without microsatellite disruption, at various ratios of mixture. For simplicity, a locus is illustrated where one population of cells is homozygous for length 19 (the germ line) and the other is homozygous for length 17 (the tumor), as shown in the top two panels in dark grey and black with white dots, respectively. The mixture at 75%, 1% and 0% tumor are shown in grey, below. The distribution of lengths with disruption is shown on the left and the length distributions without disruption is seen on the right. It is evident in this simple case that by comparing the top right panel and the middle right panel one can infer the presence of length 17 in the tumor. One would not be able to say much more. There could be minor variants in the tumor that would be missed in analysis of reads without disruption; yet seen when the lengths are determined from the reads with disrupted microsatellites. The difference between the left and right become clear when looking at disproportionate mixtures. Without disruption, it is effectively impossible to distinguish a population of 1% tumor cells from a population without tumor (lower right two panels). This is straightforward task when distributions are derived from reads with disruption (lower left two panels).

### Example 7—Determining and Detecting the Tumor Microsatellite Signature in a Tumor Biopsy and Cell-Free DNA

[0575] FIG. 15 illustrates how one would profile the new variants in a tumor, and then monitor the tumor load in the patients before and after therapy.

[0576] In the top panel, analysis for one locus is illustrated, comparing DNA from blood cells to the DNA from a biopsy of a tumor. The observed length in blood is mainly or entirely 19 bp, while in the biopsy the length 19 is observed, but a new length of 17 is also observed, which in this case is the major component. The length of 19 is expected of the normal host stroma present in every cancer biopsy, while the ne length of 17 is inferred to be from the patient's cancer. From its abundance one can also infer that many, perhaps all, of the cells of the cancer have lost any of the normal allele length at this locus.

[0577] In the middle set of panels, a similar scenario at N loci for that patient is displayed. Locus 1 is the case just examined. At locus 2 a new but minor variant is observed, perhaps originating from the tumor, but certainly not present in the majority of cancer cells. At locus three, the patient's germline is heterozygous, and the cancer has developed a new microsatellite length. At the fourth locus, the patient is homozygous, but no new variant is seen in the cancer. At the fifth locus, more than one new variant is seen in the cancer, perhaps reflecting that the cancer has clonal substructure. The N-th locus is similar to the first. All of these loci may be useful for searching the cell free component of the blood, but first, third, fifth and N-th are especially useful, as they show some of the signature microsatellite length variation of the cancer. In the bottom panels, only those loci in the analysis of the cell free DNA are shown.

[0578] In the bottom panels the analysis of the blood before and after therapy is shown. At all the indicated loci, signature of the cancer is observed. The cancer is still present in the patient, although its load has been diminished by the therapy. Notably, not all variants from the fifth locus are present after treatment, suggesting that cells from this lineage of the cancer have been more successfully removed.

### Example 8—Early Detection of a Neoplasm from Circulating Cell-Free DNA

[0579] FIG. 16 illustrates how a neoplasm in the body might be detected from a time series of measurements of the cell free component of blood: baseline measurement at time zero, and further measurements in each of the two following years. Signal is detectable on the assumption that (1) cells from a neoplasm die and release their DNA into the circulation, where they join the DNA released by death of other normal stromal cells; (2) the neoplasm is largely clonal, or has major clonal components; (3) early in the process of clonal growth the neoplasm acquires new variation at a set of microsatellite loci; and (4) the population continues to expands over time.

[0580] On the top panel a putative profile of microsatellite lengths at N loci (gray) is shown. Some loci are homozygous (1, 2, 5 and N) and some are heterozygous (3 and 4). At time zero, the baseline, the main pattern is observed in the DNA of blood cells (dark grey) and also in the cell free component of blood (dark grey). In addition, there may well be somatic variation that has arisen at some loci at the time the patient's cell free circulating DNA is first assayed (the pair of arrows on the left, loci 1 and 2, in black with white dots). The source of these variants may well be clonal subpopulations of the normal components of the blood. The proportion of these microsatellite length variants may wax and wane during the patient's lifetime, but are relatively stable, and in any are seen to reflect variants in the blood cell population.

[0581] In year one, new somatic variation appears at loci 5 and N (right arrows, grey with black dots), and this variation is not seen in the blood cells. By the second year, these new variants have undergone a rapid clonal expansion, and the possibility of a malignancy should be considered as the source.

### Example 9—Estimating Error in Length Determination Using Independent Paired Reads

[0582] It is straightforward to calculate error rates in microsatellite length measurement when the ground truth (i.e. actual microsatellite length) is known, such as in the model experiments based on synthetic templates. When that truth is not known, it is still possible to calculate error rates provided that one has two independent reads that match for the same template molecule or the same first copy of a template molecule. Under some simplifying assumptions (for example, a read has not mutated twice, that all errors lead to the same length) one can calculate error from the proportion of all matched pairs that do not agree on the length. The proportion will be 2×(1−p)×p where p is the error rate. This method is called the method of matched pair read agreement. In Table 11A and Table 11B calculations were carried out on the data from synthetic templates, and the values almost exactly match those expected from read errors calculated from the ground truth.

TABLE 11A

| | computed from pairs of reads | | | |
|---|---|---|---|---|
| | | | | pair |
| | match | mismatch | total | error rate |
| disrupted C-18 | 956575411 | 691628 | 957267039 | 0.00072 |
| disrupted CA−26 | 13033464130 | 31977608 | 13065441738 | 0.00245 |
| unmutated C-18 | 103781 | 49602 | 153383 | 0.32339 |
| unmutated CA−26 | 215185682 | 79719814 | 294905496 | 0.27032 |

TABLE 11B

| | computed from read error (synth error removed) | | | | |
|---|---|---|---|---|---|
| | | | | error | pair |
| | on-target | off-target | total | rate | error rate |
| disrupted C-18 | 1612051 | 585 | 1612636 | 0.00036 | 0.00073 |
| disrupted CA−26 | 4312537 | 5442 | 4317979 | 0.00126 | 0.00252 |
| unmutated C-18 | 44531 | 116821 | 161352 | 0.72401 | 0.39964 |
| unmutated CA−26 | 1910332 | 359410 | 2269742 | 0.15835 | 0.26655 |

[0583] From the paired agreement error rate when reads are from the same first copy and the paired agreement rate when the paired reads are from different first copies of the same initial template one can compute first round error rate. From those three rates one can estimate the rate of false positives with any number of independent reads of known provenance.

Data from Panels Confirm Low Error Rates Upon Partial Mutagenesis

[0584] Thousands of reads were obtained from panel-enriched microsatellites of a human cell line. The DNA fragments were end labeled with varietal tags and primer binding sites for amplification, and then the DNA was enriched with the panels described elsewhere in this application. Enriched DNA was then either untreated or treated with bisulfite, and then used to generate multiple first copies of the fragments. These were next amplified to prepare sequencing libraries, and sequenced. Processing of the reads included mapping the reads to the loci of the panel, identifying each read by its template and first copy tags, determining the disruption index as described in other sections of this application, and determining the length of the microsatellite. The data was further analyzed to determine the error rate as a function of initial microsatellite length, both for C- and AC-microsatellites. To do this, how often two reads from the same template molecule agree on the microsatellite length was determined using the method of matched pair read agreement. The results confirm the predictions from the studies on synthetic templates: error rates are several orders of magnitude lower for disrupted templates than for unmutated templates, and the degree of disruption matters. More detail is found in the description of FIG. 17 in the Brief Description of the Drawings.

### Example 10—Directed Partial Mutagenesis

[0585] In an optimal scenario, panels would be used to enrich microsatellites in which the microsatellite has been partially but heavily mutagenized, but the flanks used for enrichment have not. In this example, a protocol is provided which demonstrates that directed bisulfite mutagenesis works as predicted (See FIG. 18).

[0586] In this example, the inventors designed and tested a synthetic template comprised of a mononucleotide C repeat of 18 bases and two flanks, a left and a right. Blockers, sequences complementary to the flanks, were obtained. We let template and excess blocker molecules anneal, and then templates alone (FIG. 18, panel A), or templates with blockers (FIG. 18, panels B and C) were treated to bisulfite mutagenesis. We used two different treatment protocols, which differed mainly in the temperature of the reaction: 55 degrees centigrade for 30 minutes (FIG. 18, panel B), and 40 degrees for 70 minutes (FIG. 18, panel C). FIG. 18 shows every cytosine in the synthetic template: its position in the template displayed on the X-axis, and the proportion of conversion from C to T on the Y-axis. FIG. 18 shows that the blockers protect the flanks from mutagenesis almost entirely at the lower of the two temperatures.

### Example 11—Eccentricity, a Measures of Microsatellite Length Deviation

[0587] By taking a sample from a normal tissue (such as blood), the germline state of the individual is clearly evident at each locus. Typically, there are two cases: (1) there is a single allele length accounting for most of the templates (mono-allelic) or (2) two allele lengths that occur at about 50% (bi-allelic). Allele frequency calculations are adjusted to account for bias due to coverage and likelihood of disruption: shorter microsatellites are more likely to be observed in a read and more likely to be disrupted for the same mutation rate as a longer microsatellite.

[0588] Given the germline state at a locus, one can measure the eccentricity of sample to its germline state. For a given locus with germline allele state (A, B) and a frequency distribution of lengths P(l), the K-eccentricity of P with respect to (A, B) is defined as:

$${E}_{K} ( A , B , P ) = {\sum }_{l} P ( l ) min {( \vert A - l \vert , \vert B - l \vert )}^{K}$$

[0589] If the sample lengths at a locus are limited to those of the germline, the eccentricity is zero. Otherwise, the larger the weight of a non-germline allele and the greater its distance from the nearest germline allele, the larger the eccentricity value at the locus.

[0590] For a panel consisting of many loci, the eccentricity at each locus is computed and these values are summarized by calculating the mean eccentricity over all mono-C and all d-AC loci. The average eccentricity may also be computed for mono-C or di-AC loci after first restricting to loci that exhibit low eccentricity in a normal sample.

### Example 12—Microsatellite Instability (MSI)

[0591] A large proportion of tumors are deficient for mismatch-repair and exhibit elevated levels of variation in microsatellite lengths compared to germline. Tumors of this type are said to exhibit “microsatellite instability” and are labeled as MSI-high. Tumors that do no exhibit this increased variation are called MSI-low. Tumor from patients with and without microsatellite instability were examined using the blood as a source of the germline state. In the patients with microsatellite instability, a significant fraction was detected of microsatellite loci exhibiting a dominant length in the tumor that is distinct from the lengths observed in the blood of the patient.

[0592] It was observed that the MSI-high patients have tumors with non-germline lengths at 50-80% of mono-C alleles and from 20-40% of di-AC alleles. In contrast, it was observed that MSI-low patients have tumors with non-germline lengths at 5-10% of mono-C alleles and 2-5% of di-AC alleles. In practice, the inventors expect that MSI-high will include non-germline lengths at 20-80% of mono-C alleles and 10-50% of di-AC loci. The inventors expect that MSI-low tumors will include non-germline lengths at less than 15% of mono-C alleles and less than 5% of di-AC loci.

[0593] Thus, it was observed that MSI tumors have extreme eccentricity compared to blood and non-MSI tumors, and thus MSL determination and eccentricity forms a method for distinguishing tumor types.

### Example 13—Blood Vs Cell-Free

[0594] Although the inventors have not yet measured MSLV in cell-free DNA, the inventors expect that most of the DNA read in cell-free derive from the blood. Samples from both blood cells and the cell-free component of the blood are collected. By comparing the profile from blood cells to the profile from the cell-free, hematopoietic clonality in microsatellite length can be subtracted from the observations in the cell-free component. Any residual eccentricity beyond expectation indicate an expanding clone. For improved capture efficiency, multiplex accurate sensitive quantification (MASQ) protocol is adapted for targeting microsatellites.

### Example 14—Early Detection of MSI Tumors

[0595] In silico experiments were performed in which templates were sampled from tumor and blood DNA in different proportions. The eccentricity of the sample compared to the germline variants known in the blood was then computed, as described above. Using a value of K=2, the average eccentricity over all mono-C loci was computed, restricted to loci with low eccentricity in the blood (as in 1). In simulations it was observed that where the tumor proportion equals or exceeds 1 part in 200, the average eccentricity of the mixed sample exceeded the average eccentricity of the blood sample in ten thousand simulations.

### Example 15—Serial Monitoring for Detection

[0596] The emergence of a new clone will be best be detected with prior information about the cell-free state of the individual. Following the individual over time will provide the best indication of a new clone. Existing work shows a distribution of allele lengths present in the blood. That distribution is likely to be quasi-stable over time. By serial monitoring of a patient over time, the emergence of a new length in the cell-free component of the blood is distinguished from regular variation, signaling the emergence of a new clone.

### Example 16—Analysis of Microsatellites in Patients with Endometrial Tumors

[0597] DNA from tumor and blood from patients with endometrial tumors were collected. Two of the tumors (patients 53 and 55) were classified as microsatellite unstable or “MSI-high.” One of the tumors (patient 61) was classified as microsatellite stable or MSI-low. First, the DNA was fragmented and adapted with mutation resistant primers. Separately, for the blood and the tumor DNA from each patient (6 samples), enriched mutated libraries were prepared as before. The libraries were sequenced on a MiSeq instrument generating between 1 and 2 million reads per sample. Reads were mapped and analyzed as before with measurements determining the length of the microsatellite and if the microsatellite was sufficiently disrupted.

[0598] Using only disrupted reads and templates with more than one first copy and a sufficiently high consensus among reads (better than 95%), the template was assigned a microsatellite length and counted. From the blood data, the germline alleles were determined when there was sufficient coverage (20 or more templates in the major allele) and a sample was called heterozygous at a locus if the frequency of the second allele exceeded 40% the coverage of the major allele. These conditions were used and major alleles (homozygous or heterozygous) were determined in both the blood sample and the tumor sample.

TABLE 12

| | mono C | | | di AC | | |
|---|---|---|---|---|---|---|
| | | | tumor | | | tumor |
| | | | alleles | | | alleles |
| pa- | number | germline | absent in | number | germline | absent in |
| tient | of loci | alleles | germline | of loci | alleles | germline |
| 53 | 616 | 981 | 711 | 602 | 825 | 244 |
| 55 | 619 | 1008 | 587 | 590 | 834 | 178 |
| 61 | 603 | 948 | 68 | 519 | 657 | 8 |

[0599] The table above is first divided into the 630 mono-C loci and the 630 di-AC loci. Then, for each patient, the table shows the number of loci with sufficient coverage to call a genotype in both the tumor and the normal samples. The next column shows the total number of germline alleles summed over all well covered loci. The last column shows the number of significant tumor alleles that were not present in the germline alleles.

[0600] For each locus, the eccentricity in the blood and in the tumor for well-covered loci was also calculated. The plot of tumor vs normal eccentricity are provided in FIG. 19. For both the high-MSI patients (53 and 55) the eccentricity in the tumor exceeded the blood in ˜94% of mono-C loci and ˜62% of di-AC loci. In contrast, the low MSI patient (61), the tumor eccentricity exceeded the blood 51% of the time (practically random) and for the di-AC loci, the tumor eccentricity exceeded the blood 38% of the time.

[0601] In silico mixing of the blood and tumor samples was performed at various levels to simulate a cell-free profile. The tumor and blood data were sampled with replacement at different ratios while keeping the coverage fixed. The pure blood data sampled only from the blood while the 1% tumor data sampled 1% of its templates from the tumor and 99% from the blood. The pure blood sample was used to identify microsatellites with low hematopoietic instability, restricting to loci where the blood eccentricity was below 1 (as in the plots shown in FIG. 19, these are 97% of mono-C and 94% of di-AC.) The mean eccentricity value for the C and AC for each simulation is then recorded, always using the genotype determined from the blood. 10,000 simulations were performed for each concentration. In the plots shown in FIG. 20, the distribution of mean eccentricity values for the three patients and the accompanying power curves were computed using the pure blood data as the null distribution. These plots show that for high-MSI tumors, one can determine that a mixture containing greater than 0.5% of tumor against a background of 99.5% blood differs significantly from blood alone. With sufficient instability, even 0.1% tumor is measurable with a low false positive rate. In contrast, this approach is not well-powered for low-MSI tumors.

### DISCUSSION

### Template and First Copy Identity

[0602] In the first example, in which it was demonstrated that partial mutagenesis reduces replication error of microsatellite length, read redundancy is used to reduce error of length determination. Varietal tags are used to identify initial templates and their multiple individual first copies. Varietal tags are described, for example, in U.S. Pat. No. 9,404,156, the entire contents of which is specifically incorporated herein by reference.

[0603] Two varietal tags are incorporated into the synthetic templates, one of the left and one on the right of the sequences that flank the microsatellite tract. A third varietal tag is added by priming during the first-round replication of the synthetic templates. Generally speaking, in that example these varietal tags are identifiers that enable one to aggregate read lengths with the molecule from which they derive. As shown and stated herein, aggregating read length information over a first copy or an initial template reduces error when unanimity or even a consensus of those read lengths is sought. Redundant read coverage over a template thus reduces error in length determination and increases accuracy, but this cannot be accomplished without identity of the initial template or its individual first copies.

[0604] Identity of templates and their first copies does not require varietal tags. It can be achieved by other means. For example, the template may have a relatively unique set of end fragment sequences, caused for example by processes of degradation during sample processing that distinguish one template from another. Alternatively, partial mutagenesis applied to the template or its first copies will often create a random and unique pattern of sequence conversion, individually marking that DNA fragment.

### Methods of Mutagenesis

[0605] In Example 1 above, bisulfite treatment of the original template is used for partial mutagenesis. It has well-known performance characteristics, in particular the nearly random conversion of C to U, which base pairs with A and so is later read as a T (Kumar, V. et al., 2018; Levy, D. & Wigler, 2014).

[0606] However, other methods for partial mutagenesis could be used. For examples, the templates could be methylated, and then treated enzymatically. Or first copies could be mutagenized, either by bisulfite, or enzymatically after incorporation of methyl cytosine into the first copies, or after incorporating other nonstandard nucleotides that cause mutation.

[0607] Described herein in more detail is a method for enzymatic mutagenesis with methyl cytosine. In the template replication step, instead of using a mixture of only standard nucleotides, 5-methyl-dCTP is added into the standard nucleotide mixture to achieve a 1:1 ratio of standard dCTP versus 5-methyl-dCTP in the product. The incorporation of methyl-C in the PCR or template replication product is a random process.

[0608] Enzymatic Methyl-seq Conversion Module (NEB, E7125S) is used to convert standard cytosine in the PCR template to uracil, while leaving 5-methylcytosine (5mC) unchanged. This comprises two steps. The first step uses the TET2 enzyme to oxidize 5-methylcytosine into 5-carboxycytosine so that it will be protected from being converted by APOBEC. The second step uses the APOBEC enzyme to convert the non-oxidized cytosines to uracils. APOBEC itself has a heavily biased C-to-T conversion rate based on sequence context, so using APOBEC alone will not achieve a random mutation pattern.

[0609] When amplifying the APOBEC-treated product, it was discovered that adding 5-methyl-dCTP (same concentration as standard dCTP) into the standard PCR nucleotide mixture will significantly increase the yield for long (5 or 10 kb) products, probably because 5-methyl-dCTP takes slightly larger steric space than standard dCTP and this difference can be used for compensating the space taken by 5-carboxycytosine in the template.

[0610] In other implementations nonstandard nucleotides such as inosine can be incorporated into first copies. These will have altered base-pairing activities. The degree of incorporation will determine the degree of mutagenesis. In another implementation, other enzymatic treatments can be used, such as adenine deaminase, which converts adenine directly to inosine in the template. In still another implementation nick translation can be used to alter the nucleotide composition of the template directly by replacement with a nonstandard nucleotide.

### Impact of Partial Mutagenesis on Error Rates

[0611] Disruption of the tandem repeat structure reduces its replicative error rate. The degree of disruption, defined as the number of tandem repeat units that have been altered by mutagenesis and the length of the longest remaining tract of repeat units, is directly related to this reduction (FIG. 13). As the extent of mutagenesis is increased, the extent of disruption increases, but only up to a point. As complete mutagenesis is approached, a new tandem repeat can appear replacing the original one, causing a new instability in the replicative error. This is evident in Table 7 and FIG. 10.

### Directed Partial Mutagenesis

[0612] In embodiments of the invention, the repeat region of a microsatellite is partially mutagenized but the sequence of one or both of the flanking regions is left intact. In some embodiments of the invention, sample DNA is first enriched, and then mutagenized, and then replicated/amplified. But in some cases, the yield of the initial templates may be increased in an assay if sample DNA is partially mutagenized first and the sample containing mutagenized templates is then replicated/amplified and enriched with flanks from the desired loci. Unfortunately, if mutagenesis changes the flanks, enrichment may be less efficient. However, if the mutagenesis is directed to the repeat structure, and spares the flanks, efficiency of enrichment can be preserved even if sample DNA is partially mutagenized before replication, amplification, and enrichment.

[0613] Several techniques can be used to direct mutagenesis, and with bisulfite mutagenesis this is particularly straightforward. Bisulfite mutagenesis requires single stranded templates. Hence for bisulfite mutagenesis, sample DNA is typically melted, and then treated, resulting in the possibility of converting any given C in the sequence to a T. However, if after melting, an excess of synthetic oligonucleotides complementary to the flank sequence is added, a partially double stranded molecule is obtained, with the flank regions being double stranded and the repeat region single stranded. Exposing these partially double stranded partially single stranded DNA molecules to the partial bisulfite mutagenesis protocol results in the partial mutagenesis of the repeat region, but little to no mutagenesis of the flanks.

### Methods of Processing Panel-Based Partial Mutagenesis Sequence Data

[0614] Given that the average user who wishes to measure MSLV at loci enriched in panels may not possess the informatics and genomics expertise to process partially mutagenized sequence data, we provide here an example of the database and source code that could accompany a given panel-based kit, customized for that panel and method of mutagenesis.

### Overview

[0615] Most sequencing analysis programs begin with a mapper that provides coordinates of a sequence read to a reference genome. Such methods are problematic after partial mutagenesis, since the mutagenized sequence will not match the reference genome. Many potential users will not be familiar with the techniques needed to do that. Existing mutagenized sequence data alignment software is also biased against aligning reads with microsatellites of non-reference length. Moreover, mapping to the entire genome is a waste of compute time and power, given that one cares about only the mapping of reads to a fixed and known number of loci, the loci enriched by the panel. The total number of base pairs of interest are one-ten thousandth or so of the entire genome. Given that the loci of interest are small in number, and we know what can result from a given partial mutagenesis procedure, we design a method of exact matching to a relatively small alignment index database. The mapping to this database, provided with the kit, can be done rapidly on a personal computer with source code supplied with the kit

[0616] The method can be broken into three parts:
[0617] (a) An alignment index is prepared in advance, custom designed to the panel, and provided to the user;
[0618] (b) the alignment index is used to identify pairs of flank sequence matches for each locus; and
[0619] (c) from the paired flank matches, the length of the repeat sequence is measured, the repeat sequence is captured, and the disruption indices computed.

### Algorithmic Details:

[0620] Panel flank sequences have low complexity, so low that even short subsequences of the flanks immediately adjacent to each microsatellite can be unique within the set of all possible flank sequences, even while allowing for sequence conversion from partial mutagenesis. These short subsequences are recorded in the alignment database in all possible variations that can arise from partial mutagenesis, indexed to the flank from which they arise, and the precise number of bases to the boundary of the repeat sequence itself. The database structure is optimized for exact match search speed (using either a suffix array, a suffix tree, FM index, a burrows wheeler transform, or the like). Preparing this database is done once for each given panel design, and sent to the user.

[0621] A fast, unique exact matching algorithm is used to search for matches between each read and the database. If a read has a match to both flanks of a panel locus and does not match both flanks of any other locus, then that read can be confidently assigned to the panel locus matched. If a read matches the control template flanks, then that read can be confidently assigned to a control template. Since the resulting database is orders of magnitude smaller than the entire genome and the matching algorithm is exact, the alignment process is much faster than possible using standard alignment software.

[0622] Once a read has one match to a left flank subsequence and one to a right flank subsequence, the coordinates of those matches in the read are known, from which the microsatellite length is readily computed (from the distance to the microsatellite boundary contained in the index), and the microsatellite length start and stop position in the read is known, and its disruption indices are readily computed. The output data is then associated with the locus or control, as well as the template, first copy tags and/or sample tags. From this data the distribution of lengths over the various provenances can be computed, and statistical inferences made.

### General Disruption Indices

[0623] It is evident from experiments involving synthetic templates and panel-enriched microsatellite loci that the degree of disruption determines error rates. Such error rates can be conveniently measured in pairs of reads from the same template, or in pairs of reads from different first copies of the same initial templates, as seen in FIG. 17.

[0624] For the examples described herein, a combination of two disruption indices were used: setting a threshold for the proportion of C converted to T in the microsatellite; and setting a threshold for the maximum length of a repeated sequence remaining in the mutagenized microsatellite. However, any number of other disruption indices can be made, and any method for quantifying or thresholding the degree of disruption of a repeat structure are referred to herein as a generalized disruption index. Another such index, called the k-mer trace, is described here to illustrate some the structural features of a disrupted microsatellite that might be pertinent to its error rate.

The k-Mer Trace

[0625] Let S be the set of k-mers in the microsatellite. For this example, set k=5. For each 5-mer in S, compute as follows: For each instance of two exact k-mer matches in the microsatellite determine 1/d″ where d is the distance in bases of that match within the satellite, and n is a parameter that can be set as desired. Summing over all such matches gives us the “k-mer trace.” The intuition behind this measure is that the likelihood of a polymerase slipping during a replication through a repeat sequence is related to the likelihood that nearby there is an exact match k bases long for the sequence just replicated.

### Degree of Disruption and Error Rate

[0626] There are many choices for disruption indices, and parameters to choose in setting these, and for determining thresholds. In this section a general approach to using any given disruption index is provided. For any such index, one can use the method illustrated in Example 9 and FIG. 17, the method of matched pair read agreement, to determine the error rates for those reads. Note that to apply this method to sequence data, it is necessary to have at least some identity for the template and ideally for first copies of those templates, so that matched read pairs can be found. Also note that the selection of parameters and thresholds can be chosen for each specific microsatellite length and type.

### Kits

[0627] Standardized kits can be used to assess microsatellite lengths for a given set of microsatellites and a given mutagenesis protocol. The important elements of those kits will be customized components, while other components may be standardized reagents purchased from vendors. The important elements will include: (a) panels for enrichment, based on either the microsatellite flanks or the microsatellite sequence itself; (b) control templates to determine yield, degree of mutagenesis, and error rates based on degree of disruption, which control templates will match the panels and method of mutagenesis; and (c) oligonucleotide adaptors for conferring identities and replication primer binding sites and primers, which adaptors will match control templates and method of mutagenesis. A kit may also comprise oligonucleotides complementary to the flanking portions of microsatellites to protect the flanking portions from partial mutagenesis to facilitate directed partial mutagenesis as described above.

[0628] Below is an example of a complete kit.

### Kit Based on Bisulfite Mutagenesis

[0629] The following kit is designed and compiled for genomic DNA as starting material undergoing panel enrichment and bisulfite treatment (FIG. 11).

[0630] In step 1, genomic DNA is fragmentated, end polished, and 3′-dA tailed by NEBNext® Ultra™ II FS DNA Library Prep Kit for Illumina (NEB). As this kit combines all the reagents of the above three reactions, enabling these steps to be performed in the same tube without clean-ups, it avoids the sample loss and reduces bench time.

[0631] Double-stranded synthetic control templates are spiked-in each sample after step 1. These control templates have varietal tags, flanking sequences that can be captured by panels, template and sample barcodes; and universal primers. These control templates are used to monitor yield of the entire process.

[0632] Fish-tail adapters are ligated to the dsDNA (see below for details). They are designed to contain universal primers, varietal tags, and sample barcodes, which are resistant to bisulfite conversion.

[0633] In step 3, DNA fragments containing target MS loci are enriched by panels. Blockers are added to the capture solution to enhance the specificity of target enrichment by blocking non-specific hybridization between fish-tail adapter sequences.

[0634] Single-stranded synthetic control templates (I) are spiked in just before the mutagenesis step. This collection of control templates have microsatellites of known length and composition to match the panel and mutagenesis protocol, and flanking sequences that identify and delineate them. They are used to assess the efficacy of the disruption and its effects on replicative error rates, and enable the production of Look-up tables.

[0635] Enriched DNA fragments are partially bisulfite converted by EZ DNA Methylation-Direct Kit (Zymo Research) (step 4). This kit is chosen because it is designed to minimize template degradation and the loss of DNA during treatment and clean-up.

[0636] Additional single-stranded synthetic control templates (II) are added. This collection of control templates contain microsatellites with known disruptions. They are used in the production of the Look-up tables.

[0637] By using a primer containing one of the two sequencing primers (read 1 primer, P5), a varietal tag, and up2 (step 5), the first-round copies are generated via multiple cycles of linear amplification in NEBNext Q5U Master Mix (NEB). This master mix contains modified Q5® High Fidelity DNA Polymerase, optimized for amplification of uracil-containing templates. Double-stranded DNA fragments are obtained by another round of linear amplification using a primer containing the second sequencing primer (read 2 primer, P7) and up1 (step 6).

[0638] After size selection for the length range from 300 bp to 500 bp, exponential amplification in NEBNext Ultra II Q5 Master Mix (NEB) is carried out to make the final sequencing libraries (step 7). All libraries are prepared with indexed sample primers to enable pooling of samples

### FISH-TAIL Adaptors

[0639] Two oligonucleotides are designed to prepare a fish-tail primer. The first oligonucleotide contains a universal primer binding site, a varietal tag, and a sample barcode, while the second contains a different universal primer binding site and a sequence complementary to the above sample barcode. These two oligonucleotides are annealed to each other via the sample barcode sequences to form fish-tail primers with a 3′ thymine overhang. These fish-tail primers are different from those adaptors used in duplex sequencing which do not have sample barcodes and are difficult to prepare. Fish-tail primers have the following four properties: (1) the initial templates are tagged with varietal tags to facilitate the error rate estimations; (2) each of the modified templates has distinct universal primer binding sites at 5′ and 3′ ends, respectively, so linear replication can be applied to these templates to generate first copies; (3) modified initial templates, including a unique sample barcode for each sample, can be pooled before enrichment to increase the efficiency; (4) the universal primer binding sites are resistant to mutagenesis, which maintains the high efficiency of replication or amplification after the process of mutagenesis.

### Synthetic Control Templates

[0640] Control templates are used to monitor the performance features of the process: yield, degree of mutagenesis, and replication error rates. The double stranded control templates have sequences that result in enrichment by the panel, and “private” universal primers so they can be assayed throughout the process to monitor yield. The single stranded control molecules are added before (I) and after (II) mutagenesis. Those added before contain microsatellites. Those added after contain microsatellites with specified disruptions. Their flanks distinguish them from other templates. Their purpose is to provide measures of replication error. Both the single and double stranded control molecules have varietal tags for counting, and their precise sequence is matched to the methods of mutagenesis and the panels.

### Flanking Sequences and Provenance

[0641] Useful templates containing microsatellites, whether synthetic of biological origin, have flanking sequences that delineate the microsatellites. The flanking sequences are typically modified, either by ligation or by primer extension to include useful primer binding sites and identifiers. The distance between the flanking sequences is used to measure the microsatellite length. But more than that they define the provenance of the templates. For example, the flanks identify the microsatellite locus in the genome if the template originated from a biological sample, or as a synthetic template that may have been added as a control. Additionally, varietal tags may identify initial template molecules, or first copies of them. Sample barcodes are added and needed if samples are pooled.

### BIBLIOGRAPHY

[0642] Avvaru, A. K., Sharma, D., Verma, A., Mishra, R. K. & Sowpati, D. T. MSDB: a comprehensive, annotated database of microsatellites. Nucleic Acids Res 48, D155-D159, doi: 10.1093/nar/gkz886 (2020).
[0643] Bacher, J. W. et al. Development of a fluorescent multiplex assay for detection of MSI-High tumors. Dis Markers 20, 237-250, doi: 10.1155/2004/136734 (2004).
[0644] Boland, C. R. et al. A National Cancer Institute Workshop on Microsatellite Instability for cancer detection and familial predisposition: development of international criteria for the determination of microsatellite instability in colorectal cancer. Cancer Res 58, 5248-5257 (1998).
[0645] Bonneville, R. et al. Landscape of Microsatellite Instability Across 39 Cancer Types. JCO Precis Oncol 2017, 1-15, doi: 10.1200/PO.17.00073 (2017).
[0646] Bonneville, R. et al. Landscape of microsatellite instability across 39 cancer types. JCO precision oncology 1, 1-15 (2017).
[0647] Brouwer, J. R., Willemsen, R. & Oostra, B. A. Microsatellite repeat instability and neurological disease. Bioessays 31, 71-83, doi: 10.1002/bies.080122 (2009).
[0648] Clarke, L. A., Rebelo, C. S., Goncalves, J., Boavida, M. G. & Jordan, P. PCR amplification introduces errors into mononucleotide and dinucleotide repeat sequences. Mol Pathol 54, 351-353, doi: 10.1136/mp.54.5.351 (2001).
[0649] Eshleman, J. R. & Markowitz, S. D. Mismatch repair defects in human carcinogenesis. Hum Mol Genet 5 Spec No, 1489-1494, doi: 10.1093/hmg/5.supplement_1.1489 (1996).
[0650] Fujimoto, A. et al. Comprehensive analysis of indels in whole-genome microsatellite regions and microsatellite instability across 21 cancer types. Genome Res 30, 334-346, doi: 10.1101/gr.255026.119 (2020).
[0651] Fungtammasan, A. et al. Accurate typing of short tandem repeats from genome-wide sequencing data and its applications. Genome Res 25, 736-749, doi: 10.1101/gr.185892.114 (2015).
[0652] Georgiadis, A. et al. Noninvasive Detection of Microsatellite Instability and High Tumor Mutation Burden in Cancer Patients Treated with PD-1 Blockade. Clin Cancer Res 25, 7024-7034, doi: 10.1158/1078-0432.CCR-19-1372 (2019).
[0653] Goriely, A. & Wilkie, A. O. Paternal age effect mutations and selfish spermatogonial selection: causes and consequences for human disease. Am J Hum Genet 90, 175-200, doi: 10.1016/j.ajhg.2011.12.017 (2012).
[0654] Hause, R. J., Pritchard, C. C., Shendure, J. & Salipante, S. J. Classification and characterization of microsatellite instability across 18 cancer types. Nat Med 22, 1342-1350, doi: 10.1038/nm.4191 (2016).
[0655] Hause, R. J., Pritchard, C. C., Shendure, J. & Salipante, S. J. Classification and characterization of microsatellite instability across 18 cancer types. Nature medicine 22, 1342-1350 (2016).
[0656] Highnam, G. et al. Accurate human microsatellite genotypes from high-throughput resequencing data using informed error profiles. Nucleic Acids Research 41, e32-e32, doi: ARTN e3210.1093/nar/gks981 (2013).
[0657] Jaiswal, S. & Ebert, B. L. Clonal hematopoiesis in human aging and disease. Science 366, doi: 10.1126/science.aan4673 (2019).
[0658] Kim, T. M., Laird, P. W. & Park, P. J. The landscape of microsatellite instability in colorectal and endometrial cancer genomes. Cell 155, 858-868, doi: 10.1016/j.cell.2013.10.015 (2013).
[0659] Kim, T.-M., Laird, P. W. & Park, P. J. The landscape of microsatellite instability in colorectal and endometrial cancer genomes. Cell 155, 858-868 (2013).
[0660] Kumar, V. et al. Partial bisulfite conversion for unique template sequencing. Nucleic Acids Res 46, e10, doi: 10.1093/nar/gkx1054 (2018).
[0661] Kunkel, T. A. Frameshift mutagenesis by eucaryotic DNA polymerases in vitro. J Biol Chem 261, 13581-13587 (1986).
[0662] Lai, Y., Shinde, D., Arnheim, N. & Sun, F. The mutation process of microsatellites during the polymerase chain reaction. J Comput Biol 10, 143-155, doi: 10.1089/106652703321825937 (2003).
[0663] Levy, D. & Wigler, M. Facilitated sequence counting and assembly by template mutagenesis. Proc Natl Acad Sci USA 111, E4632-4637, doi: 10.1073/pnas. 1416204111 (2014).
[0664] Loman, N. J. et al. Performance comparison of benchtop high-throughput sequencing platforms. Nat Biotechnol 30, 434-439, doi: 10.1038/nbt.2198 (2012).
[0665] Luria, S. E. & Delbrück, M. Mutations of bacteria from virus sensitivity to virus resistance. Genetics 28, 491 (1943).
[0666] Lynch, H. T. et al. Review of the Lynch syndrome: history, molecular genetics, screening, differential diagnosis, and medicolegal ramifications. Clin Genet 76, 1-18, doi: 10.1111/j.1399-0004.2009.01230.x (2009).
[0667] Middha, S. et al. Reliable Pan-Cancer Microsatellite Instability Assessment by Using Targeted Next-Generation Sequencing Data. JCO Precis Oncol 2017, 1-17, doi: 10.1200/PO.17.00084 (2017).
[0668] Minoche, A. E., Dohm, J. C. & Himmelbauer, H. Evaluation of genomic high-throughput sequencing data generated on Illumina HiSeq and genome analyzer systems. Genome Biol 12, R112, doi: 10.1186/gb-2011-12-11-r112 (2011).
[0669] Moffitt, A. B. et al. Multiplex accurate sensitive quantitation (MASQ) with application to minimal residual disease in acute myeloid leukemia. Nucleic Acids Res 48, e40, doi: 10.1093/nar/gkaa090 (2020).
[0670] Murphy, K. M. et al. Comparison of the microsatellite instability analysis system and the Bethesda panel for the determination of microsatellite instability in colorectal cancers. J Mol Diagn 8, 305-311, doi: 10.2353/jmoldx.2006.050092 (2006).
[0671] Nakamura, K. et al. Sequence-specific error profile of Illumina sequencers. Nucleic Acids Res 39, e90, doi: 10.1093/nar/gkr344 (2011).
[0672] Ranum, L. P. & Day, J. W. Dominantly inherited, non-coding microsatellite expansion disorders. Curr Opin Genet Dev 12, 266-271, doi: 10.1016/s0959-437x(02) 00297-6 (2002).
[0673] Shi, J. et al. Discovery of cancer drug targets by CRISPR-Cas9 screening of protein domains. Nature biotechnology 33, 661-667 (2015).
[0674] Shinde, D., Lai, Y., Sun, F. & Arnheim, N. Taq DNA polymerase slippage mutation rates measured by PCR and quasi-likelihood analysis: (CA/GT) n and (A/T) n microsatellites. Nucleic Acids Res 31, 974-980, doi: 10.1093/nar/gkg178 (2003).
[0675] Silveira, A. B. et al. High-Accuracy Determination of Microsatellite Instability Compatible with Liquid Biopsies. Clin Chem 66, 606-613, doi: 10.1093/clinchem/hvaa013 (2020).
[0676] Snell, R. G. et al. Relationship between trinucleotide repeat expansion and phenotypic variation in Huntington's disease. Nature genetics 4, 393-397 (1993).
[0677] Stoler, N. & Nekrutenko, A. Sequencing error profiles of Illumina sequencing instruments. NAR Genom Bioinform 3, 1qab019, doi: 10.1093/nargab/1qab019 (2021).
[0678] Verkerk, A. J. et al. Identification of a gene (FMR-1) containing a CGG repeat coincident with a breakpoint cluster region exhibiting length variation in fragile X syndrome. Cell 65, 905-914, doi: 10.1016/0092-8674(91) 90397-h (1991).
[0679] Zavodna, M., Bagshaw, A., Brauning, R. & Gemmell, N. J. The accuracy, feasibility and challenges of sequencing short tandem repeats using next-generation sequencing platforms. PLOS One 9, e113862, doi: 10.1371/journal.pone.0113862 (2014).
[0680] Abbosh, C. et al. Phylogenetic ctDNA analysis depicts early-stage lung cancer evolution. Nature 545, 446 (2017).
[0681] Coombes, R. C. et al. Personalized detection of circulating tumor DNA antedates breast cancer metastatic recurrence. Clinical Cancer Research, clincanres. 3663.2018 (2019).
[0682] Cristiano, S. et al. Genome-wide cell-free DNA fragmentation in patients with cancer. Nature, 1 (2019).
[0683] Garcia-Murillas, I. et al. Mutation tracking in circulating tumor DNA predicts relapse in early breast cancer. Science translational medicine 7, 302ra133-302ra133 (2015).
[0684] Phallen, J. et al. Direct detection of early-stage cancers using circulating tumor DNA. Science translational medicine 9, eaan2415 (2017).
[0685] Tie, J. et al. Circulating tumor DNA analysis detects minimal residual disease and predicts recurrence in patients with stage II colon cancer. Science translational medicine 8, 346ra392-346ra392 (2016).

The application's sequence listing, which the Patent Office published only in electronic form, follows.

SEQUENCE LISTING (3789 sequences)

SEQ ID NO: 1 - DNA, 60 bp, Homo sapiens
  source 1..60: mol_type = genomic DNA
gattcctgcctcggagctgccgtctcccctgctggccgttctctctcccgtggggaaacg

SEQ ID NO: 2 - DNA, 60 bp, Homo sapiens
  source 1..60: mol_type = genomic DNA
gacacggcagagcccccagggctgtcccccaaccccacactgacttgaaaatgtgggatt

SEQ ID NO: 3 - DNA, 60 bp, Homo sapiens
  source 1..60: mol_type = genomic DNA
ccgcggcggcgtccgacgtcagcacagccaatcacagtgcagcaccctcgtcatgtgatt

SEQ ID NO: 4 - DNA, 60 bp, Homo sapiens
  source 1..60: mol_type = genomic DNA
tcgtggaggctcagggctgcatttcaccagaattccccttatctgtggcagtcttaacca

SEQ ID NO: 5 - DNA, 60 bp, Homo sapiens
  source 1..60: mol_type = genomic DNA
atctccggcacgccccccccagcccccgcccctacagtcccaaccccctggggctccgat

SEQ ID NO: 6 - DNA, 60 bp, Homo sapiens
  source 1..60: mol_type = genomic DNA
cccggctttcttgggctcctgggtgctgtggatcttggctgggctgctgctctgggctga

SEQ ID NO: 7 - DNA, 60 bp, Homo sapiens
  source 1..60: mol_type = genomic DNA
gaaggtgccctgagtttacagagtgggcaatgtcccctcaaggacaaactcttccgctga

SEQ ID NO: 8 - DNA, 60 bp, Homo sapiens
  source 1..60: mol_type = genomic DNA
ttgggaagagtttgtttctttttagcttgaggttggtaaaatggatttatttactccgcg

SEQ ID NO: 9 - DNA, 60 bp, Homo sapiens
  source 1..60: mol_type = genomic DNA
cttagctcagatgacggctccccacatctcagcttccacacagaagggctctggccctga

SEQ ID NO: 10 - DNA, 60 bp, Homo sapiens
  source 1..60: mol_type = genomic DNA
cctgcgacagagttggtaaggagcactgcacggctgctcactggctgcattgtgccagca

SEQ ID NO: 11 - DNA, 60 bp, Homo sapiens
  source 1..60: mol_type = genomic DNA
gtggctttccaaaggaactgaagctctgcatgatggtgactcatccctttgcccccacca

SEQ ID NO: 12 - DNA, 60 bp, Homo sapiens
  source 1..60: mol_type = genomic DNA
tcctctgtccctcctcatggtgtccagcaataaaaactgaccagtgtctttccctcccca

SEQ ID NO: 13 - DNA, 60 bp, Homo sapiens
  source 1..60: mol_type = genomic DNA
gcaagccaaggggagggcagtgccggctggttgagctcagaaaacaatgggcttctgtgg

SEQ ID NO: 14 - DNA, 60 bp, Homo sapiens
  source 1..60: mol_type = genomic DNA
agtttatcgtccagtccagggatggcggtggggaggcaacaggaagccagaaatctcatt

SEQ ID NO: 15 - DNA, 60 bp, Homo sapiens
  source 1..60: mol_type = genomic DNA
ttcggatctcccgcggaaaatgccgcgctccggttggctgctgcgacagtacaggctcca

SEQ ID NO: 16 - DNA, 60 bp, Homo sapiens
  source 1..60: mol_type = genomic DNA
aaactaagtgcagatgaagcagaggtacgggcgagtttcgagcgcggggaccggcgcgct

SEQ ID NO: 17 - DNA, 60 bp, Homo sapiens
  source 1..60: mol_type = genomic DNA
acagggtggccagcgaggggagcttcggagatcttaaggattcctcctagagccggcgca

SEQ ID NO: 18 - DNA, 60 bp, Homo sapiens
  source 1..60: mol_type = genomic DNA
cctccctcgtccagaggagagtcaggctgaaccagccgggtcccaggagaccaaaggaga

SEQ ID NO: 19 - DNA, 60 bp, Homo sapiens
  source 1..60: mol_type = genomic DNA
cccatctaaatggcggtggggcgcgctgcatccgcccgaccgccccgataattagcacag

SEQ ID NO: 20 - DNA, 60 bp, Homo sapiens
  source 1..60: mol_type = genomic DNA
cagtttcattaacctaatcccaggctccttcctcccgcacctgagggtaggaacgaacca

SEQ ID NO: 21 - DNA, 60 bp, Homo sapiens
  source 1..60: mol_type = genomic DNA
cggggcggagcgacgggcggcacagccaatcagagacaggcacgccctgaatccgccccg

SEQ ID NO: 22 - DNA, 60 bp, Homo sapiens
  source 1..60: mol_type = genomic DNA
ttcccagcgccgatcctaaaatccagccttgttctccgctcccacggtccccccttcatt

SEQ ID NO: 23 - DNA, 60 bp, Homo sapiens
  source 1..60: mol_type = genomic DNA
gcatgacaaagacagtctcaccactgtgccatggtccatacccaccccacccaccaggag

SEQ ID NO: 24 - DNA, 60 bp, Homo sapiens
  source 1..60: mol_type = genomic DNA
acctgataaccacttcttgctatctttggtggcttgctatttctagtcaccaagcttctg

SEQ ID NO: 25 - DNA, 60 bp, Homo sapiens
  source 1..60: mol_type = genomic DNA
tttttgtaatttccccaaaagacttgctggttattccacccatttgatctccgccaccaa

SEQ ID NO: 26 - DNA, 60 bp, Homo sapiens
  source 1..60: mol_type = genomic DNA
gggggctggccctgccagttggccccctttgaggtgaggagaggtgagaaaaggacctaa

SEQ ID NO: 27 - DNA, 60 bp, Homo sapiens
  source 1..60: mol_type = genomic DNA
ctggggatccttatttcccaggcagatttaggggccccactacatttctactaaggtaat

SEQ ID NO: 28 - DNA, 60 bp, Homo sapiens
  source 1..60: mol_type = genomic DNA
agctccgtggccgccgccgccccgcgggggggcggggtggggaagtgcttcgtctccccg

SEQ ID NO: 29 - DNA, 60 bp, Homo sapiens
  source 1..60: mol_type = genomic DNA
cagcagggaccaaaaccaccaagccattgcccccacagcattctcactttaagggacaga

SEQ ID NO: 30 - DNA, 60 bp, Homo sapiens
  source 1..60: mol_type = genomic DNA
tttgtcaatattggttcactctctttgcatggcaatcccaagtaaattttgtgtgttctt

SEQ ID NO: 31 - DNA, 60 bp, Homo sapiens
  source 1..60: mol_type = genomic DNA
gaaacttctttctgatcaatgtccatttctataacccactcttccaggatcttgaaacca

SEQ ID NO: 32 - DNA, 60 bp, Homo sapiens
  source 1..60: mol_type = genomic DNA
aatcttaagcatggcgacggatcgcgcgaggaagcgctgggttacaaagttgattgctcg

SEQ ID NO: 33 - DNA, 60 bp, Homo sapiens
  source 1..60: mol_type = genomic DNA
gaatttaacttgtgcatcccttaatggtgccttctcgcacattatctgtaacgccgcccg

SEQ ID NO: 34 - DNA, 60 bp, Homo sapiens
  source 1..60: mol_type = genomic DNA
aggttaagaaatgctgccacagaatgagacattaagtttgcttctaatactctcaaccta

SEQ ID NO: 35 - DNA, 60 bp, Homo sapiens
  source 1..60: mol_type = genomic DNA
agcaagtaaacagattaatgttaagggacatcagacacagcttcaggtgccttttaagga

SEQ ID NO: 36 - DNA, 60 bp, Homo sapiens
  source 1..60: mol_type = genomic DNA
atatgagggttgaaggtgtttacatagtacaaatattgttaattgcttttattgctcctg

SEQ ID NO: 37 - DNA, 60 bp, Homo sapiens
  source 1..60: mol_type = genomic DNA
ccacctgcctttccagcgcagtctttgcgcaagcgcaacacaggttgcctgttccccgcg

SEQ ID NO: 38 - DNA, 60 bp, Homo sapiens
  source 1..60: mol_type = genomic DNA
catctcatgttgtcggttttctcagtggggggatttggaaagagtcaggaccttaccaaa

SEQ ID NO: 39 - DNA, 60 bp, Homo sapiens
  source 1..60: mol_type = genomic DNA
ctgcctttggtaaatgttggttctatcatgggggattcaccaggctcaccacctccccct

SEQ ID NO: 40 - DNA, 60 bp, Homo sapiens
  source 1..60: mol_type = genomic DNA
tgtagcaattcagcgtcaagaagttcttccatttatctgactaaaacctccttccccccg

SEQ ID NO: 41 - DNA, 60 bp, Homo sapiens
  source 1..60: mol_type = genomic DNA
ctgctggaactgtgcacctcagtgtattctccctctatacctcacagcaggaactgcttg

SEQ ID NO: 42 - DNA, 60 bp, Homo sapiens
  source 1..60: mol_type = genomic DNA
cccaggaaacccttaccccagcctgggagaaggctgggctagtgctgatcatcttgagtg

SEQ ID NO: 43 - DNA, 60 bp, Homo sapiens
  source 1..60: mol_type = genomic DNA
ccctgtcctaatggagacaaaaagtgacagtgagtatttagttagaggaagaaatcacag

SEQ ID NO: 44 - DNA, 60 bp, Homo sapiens
  source 1..60: mol_type = genomic DNA
tgctctgtacatctggagccagggctgttttctgttcaaactcagaggaaggcattggag

SEQ ID NO: 45 - DNA, 60 bp, Homo sapiens
  source 1..60: mol_type = genomic DNA
tacttcttttaggcagaccccagcgtgtctgtaaagagcacctctgactcagggacccct

SEQ ID NO: 46 - DNA, 60 bp, Homo sapiens
  source 1..60: mol_type = genomic DNA
gggcaggtgggggtacatctctcaccctctgcaccctccacacacctccccatgccccga

SEQ ID NO: 47 - DNA, 60 bp, Homo sapiens
  source 1..60: mol_type = genomic DNA
gagggctgttggggcggtctcctaggagaccacacagaaacgactgcgcatgcgtgcatt

SEQ ID NO: 48 - DNA, 60 bp, Homo sapiens
  source 1..60: mol_type = genomic DNA
cactcaggagcagagaccagggggaggccatggagctatggggcctaacattagagagca

SEQ ID NO: 49 - DNA, 60 bp, Homo sapiens
  source 1..60: mol_type = genomic DNA
agggctctaaaagccctctctgactgaagcgggttgggctcaggtgaccaacccctgctg

SEQ ID NO: 50 - DNA, 60 bp, Homo sapiens
  source 1..60: mol_type = genomic DNA
attcctctcggcgcgtggggcagccctcccgcaagcctccggccttcgtgcctctctgcg

SEQ ID NO: 51 - DNA, 60 bp, Homo sapiens
  source 1..60: mol_type = genomic DNA
tgccatggtcatgctccagaagggacctatcaatggtaccatattccacacacacagaag

SEQ ID NO: 52 - DNA, 60 bp, Homo sapiens
  source 1..60: mol_type = genomic DNA
acgcccttggagtaaacagactgaatgctcttctctgtctgttctctttctggccttccg

SEQ ID NO: 53 - DNA, 60 bp, Homo sapiens
  source 1..60: mol_type = genomic DNA
taaagggaaaccctcttaggttcaagccaagaatgacccagtcttacaattcccctggca

SEQ ID NO: 54 - DNA, 60 bp, Homo sapiens
  source 1..60: mol_type = genomic DNA
aagatacctttcctccaaaggcatttgtacatctcaggaatgtagttagtggcagctgct

SEQ ID NO: 55 - DNA, 60 bp, Homo sapiens
  source 1..60: mol_type = genomic DNA
aagtgcaagggggcctcccatcccacatgactcacacgttgctcacatacacacacccag

SEQ ID NO: 56 - DNA, 60 bp, Homo sapiens
  source 1..60: mol_type = genomic DNA
cacacacagtggagccctgatatgctgcagctggacagtgggagctgagcaggcagggca

SEQ ID NO: 57 - DNA, 60 bp, Homo sapiens
  source 1..60: mol_type = genomic DNA
catggaccacacttgggctcctcagccccttgaggcctcattccaacgctgtgggacgct

SEQ ID NO: 58 - DNA, 60 bp, Homo sapiens
  source 1..60: mol_type = genomic DNA
agtattattcaccagcctggtacaagcagcctgctggtcactcagagtagatgcctcatg

SEQ ID NO: 59 - DNA, 60 bp, Homo sapiens
  source 1..60: mol_type = genomic DNA
ggtttccttagtttttggtagataggctgtttgataatgaccatttatatctgtacactg

SEQ ID NO: 60 - DNA, 60 bp, Homo sapiens
  source 1..60: mol_type = genomic DNA
aacgggtggtgtgtctcaggacaaaaggaggctcttctcattcagctaaattcacatttg

SEQ ID NO: 61 - DNA, 60 bp, Homo sapiens
  source 1..60: mol_type = genomic DNA
tatctcatgtctctttgccctcagcggcctgtgaagcccatactcttgctacagcctttt

SEQ ID NO: 62 - DNA, 60 bp, Homo sapiens
  source 1..60: mol_type = genomic DNA
acccaccaaactctgtctctctttatgctgcctctcatgacctagctaaaaatgattccg

SEQ ID NO: 63 - DNA, 60 bp, Homo sapiens
  source 1..60: mol_type = genomic DNA
ctcatgtgacttaattgaaactggcaaggatcttgagaactcaaagaagtactcccccgg

SEQ ID NO: 64 - DNA, 60 bp, Homo sapiens
  source 1..60: mol_type = genomic DNA
tctcagtttgctggtgctttggaaggaacttagggaggggacaaaaattcatattctctg

SEQ ID NO: 65 - DNA, 60 bp, Homo sapiens
  source 1..60: mol_type = genomic DNA
tcaaaaacctgtgtctcaccatcatcagtctacttaacataatttcttctaaaagtcccg

SEQ ID NO: 66 - DNA, 60 bp, Homo sapiens
  source 1..60: mol_type = genomic DNA
ctaaataggagaaggggatggagccctgatttcactcaatgtgcgcctgtgagagaaccg

SEQ ID NO: 67 - DNA, 60 bp, Homo sapiens
  source 1..60: mol_type = genomic DNA
gcgagtcatcttaccaggctgcagttaccttttaaacagaagcctagaaatgtgattcct

SEQ ID NO: 68 - DNA, 60 bp, Homo sapiens
  source 1..60: mol_type = genomic DNA
aaggtctacagtgggaggtgactacagcaggatgtggttcatgaagagccatttttcgag

SEQ ID NO: 69 - DNA, 60 bp, Homo sapiens
  source 1..60: mol_type = genomic DNA
tacggtcttggtgacatcatgagcaggacaaacatcctgaagaaaagggttccaataatg

SEQ ID NO: 70 - DNA, 60 bp, Homo sapiens
  source 1..60: mol_type = genomic DNA
tatttattgaacacgcctgggtccagggctctgtctcaggtgttactggtaatcaccgta

SEQ ID NO: 71 - DNA, 60 bp, Homo sapiens
  source 1..60: mol_type = genomic DNA
ggcatggaacctgctgggactttcctcgctccccagaggccgagtgagccccagcccctg

SEQ ID NO: 72 - DNA, 60 bp, Homo sapiens
  source 1..60: mol_type = genomic DNA
cctccagatctagccacttgaccaggccctagaatggaccagatgccccaggggtcatgg

SEQ ID NO: 73 - DNA, 60 bp, Homo sapiens
  source 1..60: mol_type = genomic DNA
ggccccctaccaggagcctgttacctccttccaagaactactccccctccccagtgtctg

SEQ ID NO: 74 - DNA, 60 bp, Homo sapiens
  source 1..60: mol_type = genomic DNA
catgtgagtcattattggacccaggaagttaaagatcaatcagtcttatcccctgcccct

SEQ ID NO: 75 - DNA, 60 bp, Homo sapiens
  source 1..60: mol_type = genomic DNA
tttcttcctaaggcttctcatgtttcatatatagtagccttcccaaagtcccatttccca

SEQ ID NO: 76 - DNA, 60 bp, Homo sapiens
  source 1..60: mol_type = genomic DNA
tttcagaattcttgaagtaacctgccatctatgtcttaagcaaaacaaactctggaggta

SEQ ID NO: 77 - DNA, 60 bp, Homo sapiens
  source 1..60: mol_type = genomic DNA
catcttagagaggaaaaagtatattttaaaagtccttgtgccatacacttcccttcccca

SEQ ID NO: 78 - DNA, 60 bp, Homo sapiens
  source 1..60: mol_type = genomic DNA
aaaattctagaaacacaattgccttttctaggaaaatgacttgtcctcccctgacaaacg

SEQ ID NO: 79 - DNA, 60 bp, Homo sapiens
  source 1..60: mol_type = genomic DNA
ttcgcagttccgagaccatgtttaatatcacatgacacctttgtcaaacagcacgtccgt

SEQ ID NO: 80 - DNA, 60 bp, Homo sapiens
  source 1..60: mol_type = genomic DNA
tgcagtccgactcccccctaccaaaacacggctccctctctcacgcggctccggcgctgg

SEQ ID NO: 81 - DNA, 60 bp, Homo sapiens
  source 1..60: mol_type = genomic DNA
ttctggaaagccagatataaatatgtgcagctcttcatctgacactacctcccccgccca

SEQ ID NO: 82 - DNA, 60 bp, Homo sapiens
  source 1..60: mol_type = genomic DNA
gtaggaaaggaaatgtatttgagaacagggactcctaaagcttacttttgtcctctgcaa

SEQ ID NO: 83 - DNA, 60 bp, Homo sapiens
  source 1..60: mol_type = genomic DNA
cgtatgtggggactcggcaatttaaacacatcccgtgaagaaactgccaacaactaagtt

SEQ ID NO: 84 - DNA, 60 bp, Homo sapiens
  source 1..60: mol_type = genomic DNA
gtaatatgtcagccagcaatgaggccaagacttgaacccagcagctttggacgacacccg

SEQ ID NO: 85 - DNA, 60 bp, Homo sapiens
  source 1..60: mol_type = genomic DNA
tccacgccaagaccttcctcggagccccagcctcacacatgcccacgcccctgccccccg

SEQ ID NO: 86 - DNA, 60 bp, Homo sapiens
  source 1..60: mol_type = genomic DNA
atggatcaggttggcatcatttaggtatggcatggatgcaaaatgttcctggagcccccg

SEQ ID NO: 87 - DNA, 60 bp, Homo sapiens
  source 1..60: mol_type = genomic DNA
ggaggccgagccacccccgcggaggaacgtcaccagaacgcagagggggccagagccgct

SEQ ID NO: 88 - DNA, 60 bp, Homo sapiens
  source 1..60: mol_type = genomic DNA
cttttcctagtactagatcttaggaatttccggaaaatttgattggtttttccacaccca

SEQ ID NO: 89 - DNA, 60 bp, Homo sapiens
  source 1..60: mol_type = genomic DNA
cgaaatgagtgcttcctgcccgccctagtccctgctctccacgggtgcgctgcgcaggga

SEQ ID NO: 90 - DNA, 60 bp, Homo sapiens
  source 1..60: mol_type = genomic DNA
tttctgtgtatgtcaccttgcatctcatggagacagaggccaagttttatcctattgtga

SEQ ID NO: 91 - DNA, 60 bp, Homo sapiens
  source 1..60: mol_type = genomic DNA
acagccccctaacaaagcagatgccacttcgttctcctacttcagagggatggccacaga

SEQ ID NO: 92 - DNA, 60 bp, Homo sapiens
  source 1..60: mol_type = genomic DNA
gcctgggcctgctacacagctgtttctgctctttctggttgctaggtaactgcatcattt

SEQ ID NO: 93 - DNA, 60 bp, Homo sapiens
  source 1..60: mol_type = genomic DNA
agggctgggctccagcatgagctaaatctgcctctcccttcctgcccgcccgcgccccca

SEQ ID NO: 94 - DNA, 60 bp, Homo sapiens
  source 1..60: mol_type = genomic DNA
gttggacccagaaaccgtcagagtctcgtggtcttagggatcaggattgctactacctca

SEQ ID NO: 95 - DNA, 60 bp, Homo sapiens
  source 1..60: mol_type = genomic DNA
acgaggacgagggtggtgcataacgcggaggtcaattttgcacagtccaggcaaaagaga

SEQ ID NO: 96 - DNA, 60 bp, Homo sapiens
  source 1..60: mol_type = genomic DNA
gtgctacagttgaacccaggctaaagaccataatccggatctttaaaggcacacaccgcg

SEQ ID NO: 97 - DNA, 60 bp, Homo sapiens
  source 1..60: mol_type = genomic DNA
gtgcttgaaatatcacatgatgaattatccactgggggacatttttatactgaggcacca

SEQ ID NO: 98 - DNA, 60 bp, Homo sapiens
  source 1..60: mol_type = genomic DNA
taactctctgtgatggacttagatgcaggagtagatggaaagagtttcatattctgacca

SEQ ID NO: 99 - DNA, 60 bp, Homo sapiens
  source 1..60: mol_type = genomic DNA
ggggcaggcccagggtgcccacctggggcctcctgtgggtgatcctggggccacaccgtt

SEQ ID NO: 100 - DNA, 60 bp, Homo sapiens
  source 1..60: mol_type = genomic DNA
tctcttttcccaacatttcaaattgttcttcggactcattgagttccctaaggtgacacg

SEQ ID NO: 101 - DNA, 60 bp, Homo sapiens
  source 1..60: mol_type = genomic DNA
cttcaaggtgaagaagggagacacagagctcacggcctcccggcaaagccttcattgccg

SEQ ID NO: 102 - DNA, 60 bp, Homo sapiens
  source 1..60: mol_type = genomic DNA
ctggtctccaacttgggccttcactgggcacagagacaccgttctttactgcttaacaat

SEQ ID NO: 103 - DNA, 60 bp, Homo sapiens
  source 1..60: mol_type = genomic DNA
cagaatgtcaccccagtcctgcctagtgtttcccccacaacttgttcccaatgatcagga

SEQ ID NO: 104 - DNA, 60 bp, Homo sapiens
  source 1..60: mol_type = genomic DNA
ggctgtcatgcaagaggggaagtaatgatgatccagagggaatatatatactcacgggaa

SEQ ID NO: 105 - DNA, 60 bp, Homo sapiens
  source 1..60: mol_type = genomic DNA
acatggacaaggtctagccttgtgcagaaatacagtaagtgttcaaagtgtctccccccg

SEQ ID NO: 106 - DNA, 60 bp, Homo sapiens
  source 1..60: mol_type = genomic DNA
acctaacattcacactccttttgttaacctcaactcaaattcccatgggaaatcctcttg

SEQ ID NO: 107 - DNA, 60 bp, Homo sapiens
  source 1..60: mol_type = genomic DNA
ctccccaggggcagggtgtctgggatccactggggcgcactggagcccagagccccggcg

SEQ ID NO: 108 - DNA, 60 bp, Homo sapiens
  source 1..60: mol_type = genomic DNA
tcctcgccgcacttcacagactcaattatcacagactcaggggcgctacgtagtcactca

SEQ ID NO: 109 - DNA, 60 bp, Homo sapiens
  source 1..60: mol_type = genomic DNA
gagaagtcctgctctcatagatccctaggcttacagactcctcagaatggcgttcagggt

SEQ ID NO: 110 - DNA, 60 bp, Homo sapiens
  source 1..60: mol_type = genomic DNA
tggatatccatatttgtcaaagtgaccactatgtacctccaagctagaaccccccctgcg

SEQ ID NO: 111 - DNA, 60 bp, Homo sapiens
  source 1..60: mol_type = genomic DNA
ccaacctcggagtaccacagcacctcctgatggccgaacggggcaacgcctcctcctatt

SEQ ID NO: 112 - DNA, 60 bp, Homo sapiens
  source 1..60: mol_type = genomic DNA
ttcttcctgctgcctctctcgaaggtttttctcagaaaactaacttgtggctgtcggacg

SEQ ID NO: 113 - DNA, 60 bp, Homo sapiens
  source 1..60: mol_type = genomic DNA
tctttgggccacattatttctgagcctttaattcaatggtttaaccaatcatttccccca

SEQ ID NO: 114 - DNA, 60 bp, Homo sapiens
  source 1..60: mol_type = genomic DNA
attaccatttggagactgtccacagtgggatttcagataggctccaaccccctacgggaa

SEQ ID NO: 115 - DNA, 60 bp, Homo sapiens
  source 1..60: mol_type = genomic DNA
agctgaatgtctatttcttaacagtttgccaaaagtccctgcaacacccactcctgggca

SEQ ID NO: 116 - DNA, 60 bp, Homo sapiens
  source 1..60: mol_type = genomic DNA
tttattaggagcagaggacgacttgtcagagattccctggtcttttctactgatacccca

SEQ ID NO: 117 - DNA, 60 bp, Homo sapiens
  source 1..60: mol_type = genomic DNA
tgggtaaagtcctcactcaattccagcaacactgctattgcacaagcgttttgcacaccg

SEQ ID NO: 118 - DNA, 60 bp, Homo sapiens
  source 1..60: mol_type = genomic DNA
ggattcacagaaccctcaagttagtcatatttgaggggagatatccacgtgtgtcatgcg

SEQ ID NO: 119 - DNA, 60 bp, Homo sapiens
  source 1..60: mol_type = genomic DNA
aggaaagcctcagttttcctacatttcctttaggtgaaatttataacccgccccccccgg

SEQ ID NO: 120 - DNA, 60 bp, Homo sapiens
  source 1..60: mol_type = genomic DNA
aagatctccattgaacagactgctctctacagccctctctagtggtagctgtttcccgct

SEQ ID NO: 121 - DNA, 60 bp, Homo sapiens
  source 1..60: mol_type = genomic DNA
agaaatgtgcagcagtgatttcaaactgagagaatcctggatgcccttctccattgtgtg

SEQ ID NO: 122 - DNA, 60 bp, Homo sapiens
  source 1..60: mol_type = genomic DNA
tgggaccctcaaggagcgtccctgaggtcagcagtgggggcaactggggctttaggcacg

SEQ ID NO: 123 - DNA, 60 bp, Homo sapiens
  source 1..60: mol_type = genomic DNA
gctttcatcaccgacacttgctgagctgtggaatttagccaacaggccagaagcatcacg

SEQ ID NO: 124 - DNA, 60 bp, Homo sapiens
  source 1..60: mol_type = genomic DNA
gtgcattcctctttactgaacttatactacactgcaatcacctgtttatgtatcaggcaa

SEQ ID NO: 125 - DNA, 60 bp, Homo sapiens
  source 1..60: mol_type = genomic DNA
cccctagtgggggacgcttttcacctctctcccacatgagggcccagcggcccggtcctg

SEQ ID NO: 126 - DNA, 60 bp, Homo sapiens
  source 1..60: mol_type = genomic DNA
ctgctctttccatagctactcttctagtctagcccttgctgttgctcctgtgggttcttg

SEQ ID NO: 127 - DNA, 60 bp, Homo sapiens
  source 1..60: mol_type = genomic DNA
tactaagccgcgggtgccaggtggggacacagagatgcccaggtctccccggccgtccag

SEQ ID NO: 128 - DNA, 60 bp, Homo sapiens
  source 1..60: mol_type = genomic DNA
acagtcccctcctagggtgtgagctccggagggcagggccgcctcctccacactccctcg

SEQ ID NO: 129 - DNA, 60 bp, Homo sapiens
  source 1..60: mol_type = genomic DNA
tattagcagctgaggctctaagaacatggatctttcaaggtggtggttctgcagacaaca

SEQ ID NO: 130 - DNA, 60 bp, Homo sapiens
  source 1..60: mol_type = genomic DNA
gataacctgggtgtaatgtaaagattttcatgggtacaattctccttcccactctcatca

SEQ ID NO: 131 - DNA, 60 bp, Homo sapiens
  source 1..60: mol_type = genomic DNA
tgactctcaaaaggaaacttttcaggtatgaggaaagacattttgagagagggagccccg

SEQ ID NO: 132 - DNA, 60 bp, Homo sapiens
  source 1..60: mol_type = genomic DNA
actgggtgattgaaaacactaaaggaattgtgtaaatatagatccccacctcccccgccg

SEQ ID NO: 133 - DNA, 60 bp, Homo sapiens
  source 1..60: mol_type = genomic DNA
gaggctttgcgatgcacgagaacacgggcacagccacctacttgctggggctgctgctag

SEQ ID NO: 134 - DNA, 60 bp, Homo sapiens
  source 1..60: mol_type = genomic DNA
tgcccaccaaggcctcattgcacattgtcgagattggggcatcctcttcacccccacaga

SEQ ID NO: 135 - DNA, 60 bp, Homo sapiens
  source 1..60: mol_type = genomic DNA
agccacctactcttccactgcggggacaggggggagcgtgagccgccgcccgcgcccgcg

SEQ ID NO: 136 - DNA, 60 bp, Homo sapiens
  source 1..60: mol_type = genomic DNA
tgtttatccccgcaattagcgatgcggcccttttcaggccgcccgcccccgggccccccg

SEQ ID NO: 137 - DNA, 60 bp, Homo sapiens
  source 1..60: mol_type = genomic DNA
cattttctgctctggctaatggaagtgaacaaatggtgacctcgaggtgggccctgcccg

SEQ ID NO: 138 - DNA, 60 bp, Homo sapiens
  source 1..60: mol_type = genomic DNA
gcctcagcctgggacgctgtgatagagctgggcaggccccaggagatgcatttgcagacg

SEQ ID NO: 139 - DNA, 60 bp, Homo sapiens
  source 1..60: mol_type = genomic DNA
cattgtggcatggcttttggagttaatatgaactcaaatcagatgcattaaccaccccca

SEQ ID NO: 140 - DNA, 60 bp, Homo sapiens
  source 1..60: mol_type = genomic DNA
ccccccggtaccagacctcaccgagggaatgtgatatccggcttcgctcccacccaccaa

SEQ ID NO: 141 - DNA, 60 bp, Homo sapiens
  source 1..60: mol_type = genomic DNA
actacattttaatgaattaggaggaatttttctactcatttgcctgggaggcaatttaag

SEQ ID NO: 142 - DNA, 60 bp, Homo sapiens
  source 1..60: mol_type = genomic DNA
tcagcatgcaattgaaagggtgaatagggacaggactttatagaccacagcctcacctga

SEQ ID NO: 143 - DNA, 60 bp, Homo sapiens
  source 1..60: mol_type = genomic DNA
tggagcagggcgcctcctcggcccaacctggcggcctctgcgcctgcgcgcgccgccccg

SEQ ID NO: 144 - DNA, 60 bp, Homo sapiens
  source 1..60: mol_type = genomic DNA
agctttcttttgctttgtgtactgaagtgaagcgaggctttccgcccccctcccccctca

SEQ ID NO: 145 - DNA, 60 bp, Homo sapiens
  source 1..60: mol_type = genomic DNA
agtatgtaaatggacatttcctggatgaaccaatgaccgtcccccacgcccccccgccct

SEQ ID NO: 146 - DNA, 60 bp, Homo sapiens
  source 1..60: mol_type = genomic DNA
tcatcatgcctaatggctatgaatatggcatgagtgttacctgcatattcttgctaaagt

SEQ ID NO: 147 - DNA, 60 bp, Homo sapiens
  source 1..60: mol_type = genomic DNA
aaagatgcctatgtagccgcggttcacacaggggcacccacagacctcgcgcttcatgta

SEQ ID NO: 148 - DNA, 60 bp, Homo sapiens
  source 1..60: mol_type = genomic DNA
tagtaaataagtgcctagccttaggaggctattgacctttgataatgtgagcagataaag

SEQ ID NO: 149 - DNA, 60 bp, Homo sapiens
  source 1..60: mol_type = genomic DNA
ttttcctccttatcaggtctgaaatttgaaactattccctcaagggattcactctatttg

SEQ ID NO: 150 - DNA, 60 bp, Homo sapiens
  source 1..60: mol_type = genomic DNA
aaattagttatgtctgaaattttaggtcaaaacgaaagggaggcaagataaataagattt

SEQ ID NO: 151 - DNA, 60 bp, Homo sapiens
  source 1..60: mol_type = genomic DNA
ttccactaggcactccatcatgaatatcaataccctcctgtcacatgggaagacatgtga

SEQ ID NO: 152 - DNA, 60 bp, Homo sapiens
  source 1..60: mol_type = genomic DNA
agtcactatcttcatttagctcaaggtgaagaagactgagaagaaacgtcaaaacccatt

SEQ ID NO: 153 - DNA, 60 bp, Homo sapiens
  source 1..60: mol_type = genomic DNA
ccggttcttttgctttcctttctgggtgaggggaggccggaagcttgggaaaggtgtgtg

SEQ ID NO: 154 - DNA, 60 bp, Homo sapiens
  source 1..60: mol_type = genomic DNA
ggcctcgggttcaaatcaccggcgcgcagggactggactcgcgggtagcgacccccccaa

SEQ ID NO: 155 - DNA, 60 bp, Homo sapiens
  source 1..60: mol_type = genomic DNA
agcaatacatgctctacctattataaacctgagtggttccaggtgggagaggtagagcaa

SEQ ID NO: 156 - DNA, 60 bp, Homo sapiens
  source 1..60: mol_type = genomic DNA
aacttaattcccatctcaccctcagaaatttgcttctccttatgtcatgtttttcatctt

SEQ ID NO: 157 - DNA, 60 bp, Homo sapiens
  source 1..60: mol_type = genomic DNA
ccttggatattgggaagcagagtataaccttgaaaaggaaaattacaaataatgtcagga

SEQ ID NO: 158 - DNA, 60 bp, Homo sapiens
  source 1..60: mol_type = genomic DNA
aatatgaaaagcattccttagagtacagtgccatttacatggattgcaatgtggatgatg

SEQ ID NO: 159 - DNA, 60 bp, Homo sapiens
  source 1..60: mol_type = genomic DNA
aagcatctgttaaacacttgcattatcctctgactgataaaaaaagtttttttaaccctg

SEQ ID NO: 160 - DNA, 60 bp, Homo sapiens
  source 1..60: mol_type = genomic DNA
gttggtgtctgaaggagctagatgcacatgaattttcagtctctgagtgtgatcctacag

SEQ ID NO: 161 - DNA, 60 bp, Homo sapiens
  source 1..60: mol_type = genomic DNA
agtcttcttgatctgtactcattgaagggagctgctttgcaggtctcgatttgcttcctt

SEQ ID NO: 162 - DNA, 60 bp, Homo sapiens
  source 1..60: mol_type = genomic DNA
ttaaacagatagctcagatacaccacaggaactaccagcattttctgtttaatttattta

SEQ ID NO: 163 - DNA, 60 bp, Homo sapiens
  source 1..60: mol_type = genomic DNA
ctgcggagacagaacccaaagagcacagaggcagacactgaattagtgaccctgccaccg

SEQ ID NO: 164 - DNA, 60 bp, Homo sapiens
  source 1..60: mol_type = genomic DNA
tgtcatcggagcaaacggggacaagtcgtacctggcaggacactgagccgtgcacggctg

SEQ ID NO: 165 - DNA, 60 bp, Homo sapiens
  source 1..60: mol_type = genomic DNA
ggatttaagtccccacacggtcaccctcaaccaccagtgacgagcatctgtggataaacg

SEQ ID NO: 166 - DNA, 60 bp, Homo sapiens
  source 1..60: mol_type = genomic DNA
cttcctaaaaagctccaagccacaatcaggtggctaagccattctggattccaacccccg

SEQ ID NO: 167 - DNA, 60 bp, Homo sapiens
  source 1..60: mol_type = genomic DNA
ccagtcctttgcatttaatctgtggcaccgatgagctcccaccttgggcagccctgacct

SEQ ID NO: 168 - DNA, 60 bp, Homo sapiens
  source 1..60: mol_type = genomic DNA
aaagcaaccaactctcagtggtaaacgaagcacagccagtgtattggttaattctgcttt

SEQ ID NO: 169 - DNA, 60 bp, Homo sapiens
  source 1..60: mol_type = genomic DNA
tctctcaccccctgcttaggtaccatatatctggcagtagctggtctctcctctatgaaa

SEQ ID NO: 170 - DNA, 60 bp, Homo sapiens
  source 1..60: mol_type = genomic DNA
ttgtcaactgtatatgttcatacaattatcaaaataggaagtatacaaaaactctagatg

SEQ ID NO: 171 - DNA, 60 bp, Homo sapiens
  source 1..60: mol_type = genomic DNA
aacattgtggcatagcttaaatatgtgctagtttacccctaactcccctgcccccccccg

SEQ ID NO: 172 - DNA, 60 bp, Homo sapiens
  source 1..60: mol_type = genomic DNA
tctctgtggcctggaaacttctctgatcctgagcttccgaccagctgtgaaaggtttaag

SEQ ID NO: 173 - DNA, 60 bp, Homo sapiens
  source 1..60: mol_type = genomic DNA
tttcaagaacactggttgaatttcatggtttcaatagatgaccattagctgttatgtgca

SEQ ID NO: 174 - DNA, 60 bp, Homo sapiens
  source 1..60: mol_type = genomic DNA
agatattcattagtgtggctatctgattgatatttgtcttgatctttgcctcccccccat

SEQ ID NO: 175 - DNA, 60 bp, Homo sapiens
  source 1..60: mol_type = genomic DNA
cttagcgccacacccatttaaatgcacaagcaaccaaaattgctccctccccccgcaaca

SEQ ID NO: 176 - DNA, 60 bp, Homo sapiens
  source 1..60: mol_type = genomic DNA
gactgtcacagtccaacagatggaaagctttgactgtctctcctaccatcccatctgatt

SEQ ID NO: 177 - DNA, 60 bp, Homo sapiens
  source 1..60: mol_type = genomic DNA
gaaccaaaaagtgaatgtaactggcatgcttttgagctgttacctatacctcacaccgca

SEQ ID NO: 178 - DNA, 60 bp, Homo sapiens
  source 1..60: mol_type = genomic DNA
tttgtggtgtgggtggcctatggtggtgcttcctttcacaaattgtgtgtccgtgtgaca

SEQ ID NO: 179 - DNA, 60 bp, Homo sapiens
  source 1..60: mol_type = genomic DNA
ctctccttaaggagccctcggggagagaaaaaagccttccaaacaggcttatgccttaca

SEQ ID NO: 180 - DNA, 60 bp, Homo sapiens
  source 1..60: mol_type = genomic DNA
ggaatgaagattctggttcttctatttggtgtccaggtcctctctgcttccctcctccca

SEQ ID NO: 181 - DNA, 60 bp, Homo sapiens
  source 1..60: mol_type = genomic DNA
agataaaacaggctctttccacacaattagccttctgactgcacccccttcaccccaccg

SEQ ID NO: 182 - DNA, 60 bp, Homo sapiens
  source 1..60: mol_type = genomic DNA
caaggtttctcagcccttccgagggacagcagggactagaacaggcaccccccgcccccg

SEQ ID NO: 183 - DNA, 60 bp, Homo sapiens
  source 1..60: mol_type = genomic DNA
tcacagggtccccgggcctaagggttgcccaccaggcacaattcaggatcccccccccaa

SEQ ID NO: 184 - DNA, 60 bp, Homo sapiens
  source 1..60: mol_type = genomic DNA
tttgcgaagactcaacttgtttatgacacggtccaaataataacccttgcagactgcccg

SEQ ID NO: 185 - DNA, 60 bp, Homo sapiens
  source 1..60: mol_type = genomic DNA
caaggaattggcgtaagggacattgggagaatataacatgcccctcgggagttctcaaga

SEQ ID NO: 186 - DNA, 60 bp, Homo sapiens
  source 1..60: mol_type = genomic DNA
gtgaagctcacctgcaggcacaatgtgctgtgtctcacttctgtgcccatagccgagctg

SEQ ID NO: 187 - DNA, 60 bp, Homo sapiens
  source 1..60: mol_type = genomic DNA
ttgctgttgaggtaatcagcctggcctctctacccccagtgcaccatggccccgccctct

SEQ ID NO: 188 - DNA, 60 bp, Homo sapiens
  source 1..60: mol_type = genomic DNA
atattgttaagaaaggggtcggggggatcagccaaggtccatcattgcttttttgccgcg

SEQ ID NO: 189 - DNA, 60 bp, Homo sapiens
  source 1..60: mol_type = genomic DNA
tggtcaagggctgttctctggctagcctggcacccatcttttcttgtgagacagcccaaa

SEQ ID NO: 190 - DNA, 60 bp, Homo sapiens
  source 1..60: mol_type = genomic DNA
tgccgtagaagcctgatggggacccagctctgctgcctcccgctgtgtggctgggcctgt

SEQ ID NO: 191 - DNA, 60 bp, Homo sapiens
  source 1..60: mol_type = genomic DNA
cgtgacgtaagagcggggctcgagcctccacactgcggctgcgcggcccaagcatttcca

SEQ ID NO: 192 - DNA, 60 bp, Homo sapiens
  source 1..60: mol_type = genomic DNA
ggcagaggccagggagtgcctcactattttgcaaatgccgaccctgtggcctgctgcccg

SEQ ID NO: 193 - DNA, 60 bp, Homo sapiens
  source 1..60: mol_type = genomic DNA
ctggcgcgcgagagaccgagaaaaggtgacgcggggcccgggcaggcggccggcgcgcgg

SEQ ID NO: 194 - DNA, 60 bp, Homo sapiens
  source 1..60: mol_type = genomic DNA
ggaagctagaccctgggcttcagagaacaaaggagcacttatttagttccacaacagaca

SEQ ID NO: 195 - DNA, 60 bp, Homo sapiens
  source 1..60: mol_type = genomic DNA
gtctagaaaaactaatgcagttagagcaggttttcctcgtgccagtgtcctcatatccca

SEQ ID NO: 196 - DNA, 60 bp, Homo sapiens
  source 1..60: mol_type = genomic DNA
cagcctttggaaacatcttcagaaagataaggatgattgtggttgttgaaaataaacacg

SEQ ID NO: 197 - DNA, 60 bp, Homo sapiens
  source 1..60: mol_type = genomic DNA
aaaatagaaagattcagccttattgggtttaaaagagagaggtgcaccccggggctgtgg

SEQ ID NO: 198 - DNA, 60 bp, Homo sapiens
  source 1..60: mol_type = genomic DNA
agcaatgtatgttcagtaaaatcacctgcagagcaaaagtctgttgactaactaccgcct

SEQ ID NO: 199 - DNA, 60 bp, Homo sapiens
  source 1..60: mol_type = genomic DNA
ctcattcttttgcagagagaaaggagaagagtgccaagatgtcattgtgaacaccaccca

SEQ ID NO: 200 - DNA, 60 bp, Homo sapiens
  source 1..60: mol_type = genomic DNA
cttttgctccttttcctccctcctggagctggtggtagagaatggacataatttgctgat

SEQ ID NO: 201 - DNA, 60 bp, Homo sapiens
  source 1..60: mol_type = genomic DNA
ccatggagatgctttcaagggcatttaacagaggtaaagcagcctgttttccctgactta

SEQ ID NO: 202 - DNA, 60 bp, Homo sapiens
  source 1..60: mol_type = genomic DNA
aatctcaattgacgtttatcaattccaccaggcagaagcctttctggatgtatcttgctt

SEQ ID NO: 203 - DNA, 60 bp, Homo sapiens
  source 1..60: mol_type = genomic DNA
tataattaacaatgctggacccattgagaaatgaaagaactaaggaattttattctcccg

SEQ ID NO: 204 - DNA, 60 bp, Homo sapiens
  source 1..60: mol_type = genomic DNA
tagagaatgtcgccctctactgcgtttaaggtgtgtcttttttcccattagggaatgtcg

SEQ ID NO: 205 - DNA, 60 bp, Homo sapiens
  source 1..60: mol_type = genomic DNA
tgagacatgcctgaaataagtacctggacttttaagggaaaaggaggactcaagcatgat

SEQ ID NO: 206 - DNA, 60 bp, Homo sapiens
  source 1..60: mol_type = genomic DNA
atgcacagtgaggaaggtggaatgaggtgccaacgtagcccatccagggaaggaagacag

SEQ ID NO: 207 - DNA, 60 bp, Homo sapiens
  source 1..60: mol_type = genomic DNA
gtcacgattataacttagggcacattctgctctcacctggtatatttaactctagtactg

SEQ ID NO: 208 - DNA, 60 bp, Homo sapiens
  source 1..60: mol_type = genomic DNA
atgtgccagccactgtaataattttttatgtggcatttcgcttaatttctcctgttaccg

SEQ ID NO: 209 - DNA, 60 bp, Homo sapiens
  source 1..60: mol_type = genomic DNA
cccctctcatagttataagaaaaacttgattatgtgaaacgatacctttctctgtcagtg

SEQ ID NO: 210 - DNA, 60 bp, Homo sapiens
  source 1..60: mol_type = genomic DNA
ccttcctgctggcggacgtcttgagaactttctgaagtaatccccactctctcggcccca

SEQ ID NO: 211 - DNA, 60 bp, Homo sapiens
  source 1..60: mol_type = genomic DNA
aaggcatcaactatgccaccaaatcattttattgtagtatagggatgtaaatttagcatt

SEQ ID NO: 212 - DNA, 60 bp, Homo sapiens
  source 1..60: mol_type = genomic DNA
agcccttggggacttcctcttgatttgaatctgctgaacacctgccgcacccccaccgca

SEQ ID NO: 213 - DNA, 60 bp, Homo sapiens
  source 1..60: mol_type = genomic DNA
ccactagattgaaaaatctattgaggcttggagaagaactgtgtgtcttaaacatttccg

SEQ ID NO: 214 - DNA, 60 bp, Homo sapiens
  source 1..60: mol_type = genomic DNA
ctccttccttcttcatctgtccttggcctcaaaaatggacctgcattggtcacatccccg

SEQ ID NO: 215 - DNA, 60 bp, Homo sapiens
  source 1..60: mol_type = genomic DNA
ctttttgtatgtgtcaaaatgaactttctgctttagccaaatgactacgttcaaggggtt

SEQ ID NO: 216 - DNA, 60 bp, Homo sapiens
  source 1..60: mol_type = genomic DNA
acccataactggactcataatctctatttccagacctactttcagcttcctggtgttgtt

SEQ ID NO: 217 - DNA, 60 bp, Homo sapiens
  source 1..60: mol_type = genomic DNA
gcccaagttcttctaactcaggctgcgctccgatctgtcatcgcgttatttcgcactcca

SEQ ID NO: 218 - DNA, 60 bp, Homo sapiens
  source 1..60: mol_type = genomic DNA
ggcagagatagcacacccaggagagtggccaagcgccccccatagacggacccacaggcg

SEQ ID NO: 219 - DNA, 60 bp, Homo sapiens
  source 1..60: mol_type = genomic DNA
cggccttcaccctggcacccaaggctaccaggtgatccacaggaggcagcgcccctgagt

SEQ ID NO: 220 - DNA, 60 bp, Homo sapiens
  source 1..60: mol_type = genomic DNA
agactggtgacagctcagtggggactggggcgctgtgtgctgtgaagggaacccggccca

SEQ ID NO: 221 - DNA, 60 bp, Homo sapiens
  source 1..60: mol_type = genomic DNA
cctccccttctgctagcacccccccccagaaaaagccctgaaaccttctccaggaagcag

SEQ ID NO: 222 - DNA, 60 bp, Homo sapiens
  source 1..60: mol_type = genomic DNA
tctttggtgggaatccagtgcctctgtctacggcagccgcatctccagccacgccccacg

SEQ ID NO: 223 - DNA, 60 bp, Homo sapiens
  source 1..60: mol_type = genomic DNA
aatcctctccacgccatttataggaatcccttgtaacggggtccagacccaccccgccct

SEQ ID NO: 224 - DNA, 60 bp, Homo sapiens
  source 1..60: mol_type = genomic DNA
aggtggggcagctccggctctgccacccccgcctcacgtcccacttcccactcccagcaa

SEQ ID NO: 225 - DNA, 60 bp, Homo sapiens
  source 1..60: mol_type = genomic DNA
agcagagccagcccgctcaacagcagggccacaattgcctgtggcccctggggagtgaca

SEQ ID NO: 226 - DNA, 60 bp, Homo sapiens
  source 1..60: mol_type = genomic DNA
agtaactggaaagcgccccccgcctccactattatagcaccatggacagtgactcaccaa

SEQ ID NO: 227 - DNA, 60 bp, Homo sapiens
  source 1..60: mol_type = genomic DNA
caaaaaccttagggtcaacattgatgctttctactttccctctgtctccccccaacacca

SEQ ID NO: 228 - DNA, 60 bp, Homo sapiens
  source 1..60: mol_type = genomic DNA
agctctacagactttccagtattcgaactaatacttgaatcctagaattttcctgccccg

SEQ ID NO: 229 - DNA, 60 bp, Homo sapiens
  source 1..60: mol_type = genomic DNA
aggcagtgcattttaaatcttagaccttattatggagcgaatggctgtgttctgtgttaa

SEQ ID NO: 230 - DNA, 60 bp, Homo sapiens
  source 1..60: mol_type = genomic DNA
aggactgtcgggctttgacccatcactctacctacacccttcttctgagggcagctaatg

SEQ ID NO: 231 - DNA, 60 bp, Homo sapiens
  source 1..60: mol_type = genomic DNA
actcattaaatgtcttacaaggattctttaagtatgccctgtaggcgtctttatacccaa

SEQ ID NO: 232 - DNA, 60 bp, Homo sapiens
  source 1..60: mol_type = genomic DNA
tgtcatttcgctgaggccagaatttgtgtcacacatttccaagatggggcaagcccaggt

SEQ ID NO: 233 - DNA, 60 bp, Homo sapiens
  source 1..60: mol_type = genomic DNA
gcaacatggagctattggagataaatctcaccacctccccctcactggcccccggctcct

SEQ ID NO: 234 - DNA, 60 bp, Homo sapiens
  source 1..60: mol_type = genomic DNA
aaaaattgtactcttgtttttaagcacatataatccctcacttctattcaaaaatgaaag

SEQ ID NO: 235 - DNA, 60 bp, Homo sapiens
  source 1..60: mol_type = genomic DNA
gaggctgtggtacttctggtaggtcacaactcctccttgttccctaccccgagagctctg

SEQ ID NO: 236 - DNA, 60 bp, Homo sapiens
  source 1..60: mol_type = genomic DNA
tcggagagggcgcgcccgctggccagaggaccaatcagtgcacggcaggctcgcaggccg

SEQ ID NO: 237 - DNA, 60 bp, Homo sapiens
  source 1..60: mol_type = genomic DNA
tgattggttttccgctgagagaaaatagccagtcaaaggaaggcgctggcagtctgcccg

SEQ ID NO: 238 - DNA, 60 bp, Homo sapiens
  source 1..60: mol_type = genomic DNA
ccacacaggagacccacaggatgaggaataaataaaggaccccgggattcccgctcgact

SEQ ID NO: 239 - DNA, 60 bp, Homo sapiens
  source 1..60: mol_type = genomic DNA
cgagcacctcctgggttctcaaaattaggtttaattagattcacctggtaaaaatgcgga

SEQ ID NO: 240 - DNA, 60 bp, Homo sapiens
  source 1..60: mol_type = genomic DNA
agtcctccaacgattcgttttcagaacacgctgctgcgttctgaaaagaaaaaaaagacg

SEQ ID NO: 241 - DNA, 60 bp, Homo sapiens
  source 1..60: mol_type = genomic DNA
aatcttgtaggccataatccacattatagtaattgtcaagggtttgttttttcccatccg

SEQ ID NO: 242 - DNA, 60 bp, Homo sapiens
  source 1..60: mol_type = genomic DNA
tccctcttttctggagtcttggggacacttggtttctgtgtgttcctcatttcaactcga

SEQ ID NO: 243 - DNA, 60 bp, Homo sapiens
  source 1..60: mol_type = genomic DNA
aagccatcatcagtactgtacctgtaattggaccgtggttcagggttatgtgccccccat

SEQ ID NO: 244 - DNA, 60 bp, Homo sapiens
  source 1..60: mol_type = genomic DNA
cagccccaggctagccctccttagcctctccgaaggcttctccgcagatctctttttccg

SEQ ID NO: 245 - DNA, 60 bp, Homo sapiens
  source 1..60: mol_type = genomic DNA
aaaaatcttgtcatgtgaattttacttttgaacttttttggtttagatctgccttacctt

SEQ ID NO: 246 - DNA, 60 bp, Homo sapiens
  source 1..60: mol_type = genomic DNA
atgctaggccaccccaggcttctggatatttctttctgattgttaagggggatctaggcg

SEQ ID NO: 247 - DNA, 60 bp, Homo sapiens
  source 1..60: mol_type = genomic DNA
gactggctccgctgtgtatgttgttgatatcccacactgggcacccgccccacgcacccg

SEQ ID NO: 248 - DNA, 60 bp, Homo sapiens
  source 1..60: mol_type = genomic DNA
tagggaaaaatactttatgactttgttacaaaaaacttcattcttccctttcccatccca

SEQ ID NO: 249 - DNA, 60 bp, Homo sapiens
  source 1..60: mol_type = genomic DNA
cgtcctcccacttcccggttcaagtttcactggtgtcccgacccgtccccctgccctctg

SEQ ID NO: 250 - DNA, 60 bp, Homo sapiens
  source 1..60: mol_type = genomic DNA
ggcaggagaggtggccaagccactttttagccacaccccttgctttggtctctgtaatat

SEQ ID NO: 251 - DNA, 60 bp, Homo sapiens
  source 1..60: mol_type = genomic DNA
atagtagccatatggcacacacacctaatagtcaggtccacttccacttccaggcgggag

SEQ ID NO: 252 - DNA, 60 bp, Homo sapiens
  source 1..60: mol_type = genomic DNA
aaggttagcccagagcatgttcaggattgggattgagtcacgccccttacctcccacctg

SEQ ID NO: 253 - DNA, 60 bp, Homo sapiens
  source 1..60: mol_type = genomic DNA
acacctcaggagagtccctgctcatctggcctccacaccctggtcctggtctcaaggccg

SEQ ID NO: 254 - DNA, 60 bp, Homo sapiens
  source 1..60: mol_type = genomic DNA
tccccacggcccagcactgccttcccctccagaggccaggtggctctatctctttgcctt

SEQ ID NO: 255 - DNA, 60 bp, Homo sapiens
  source 1..60: mol_type = genomic DNA
cgcgcacccggccggcggcggcgcggctcgcggcccagccaccggttgctatagcgatgt

SEQ ID NO: 256 - DNA, 60 bp, Homo sapiens
  source 1..60: mol_type = genomic DNA
ctcagggtttttgtggttggcttgaataaatgctattgagcatggcaaatgaatgcagcg

SEQ ID NO: 257 - DNA, 60 bp, Homo sapiens
  source 1..60: mol_type = genomic DNA
ttggaagatggttaaggcccttctaggtctcaaatgccttgacgtccccatgacctatgt

SEQ ID NO: 258 - DNA, 60 bp, Homo sapiens
  source 1..60: mol_type = genomic DNA
actgtaaaagcaatcagaagtatacagttattggaaggtctacaagttaggactagggaa

SEQ ID NO: 259 - DNA, 60 bp, Homo sapiens
  source 1..60: mol_type = genomic DNA
aaattatattcagtatctaaagaaacaacagcagccgttcccgagagggaccgaccccat

SEQ ID NO: 260 - DNA, 60 bp, Homo sapiens
  source 1..60: mol_type = genomic DNA
gcctcttcagtgcgctggcttttaatcttgtcgagggggaggtcttcctcgcagggacaa

SEQ ID NO: 261 - DNA, 60 bp, Homo sapiens
  source 1..60: mol_type = genomic DNA
acttaccaaacaaccctattttgtgagggataggctatcatcacccagaaccgtccgccg

SEQ ID NO: 262 - DNA, 60 bp, Homo sapiens
  source 1..60: mol_type = genomic DNA
aacttgcatagtgcctttttctgtagccatctgggggcaggaaatttaatatgttcatga

SEQ ID NO: 263 - DNA, 60 bp, Homo sapiens
  source 1..60: mol_type = genomic DNA
ctggtggctccataacacaatagtccaggcccctagacatcttgcttcctgggtttctga

SEQ ID NO: 264 - DNA, 60 bp, Homo sapiens
  source 1..60: mol_type = genomic DNA
cacttcctgaccggaaggccgagccccacctggcctgacaacatggcggccgggagaagg

SEQ ID NO: 265 - DNA, 60 bp, Homo sapiens
  source 1..60: mol_type = genomic DNA
atacttggttgctgatatattaacattttggtctgttttatatccctttaaaggaggcaa

SEQ ID NO: 266 - DNA, 60 bp, Homo sapiens
  source 1..60: mol_type = genomic DNA
tctatgtgggacccacttgagaaatactactccagggaacccgccctcctgcccccccct

SEQ ID NO: 267 - DNA, 60 bp, Homo sapiens
  source 1..60: mol_type = genomic DNA
gctgggctcttcctggtgtatcttgctgtttaaaggcacagaaccaggcagacattcacg

SEQ ID NO: 268 - DNA, 60 bp, Homo sapiens
  source 1..60: mol_type = genomic DNA
agacaatcccttccattcggcgcgagccgcccattggttccccgggcccgcctcacgtga

SEQ ID NO: 269 - DNA, 60 bp, Homo sapiens
  source 1..60: mol_type = genomic DNA
tctttttaagaatgctttccaactaaaacattcaggtatcttggcacttatatgaaaacg

SEQ ID NO: 270 - DNA, 60 bp, Homo sapiens
  source 1..60: mol_type = genomic DNA
gaggagaagccgaggtcccgctgggtctggtacatgcgagacccccagggtattcgcaga

SEQ ID NO: 271 - DNA, 60 bp, Homo sapiens
  source 1..60: mol_type = genomic DNA
cagtatctaccaaaaaggttcaaaaagggttcaagggactatgctctaccaccgccccca

SEQ ID NO: 272 - DNA, 60 bp, Homo sapiens
  source 1..60: mol_type = genomic DNA
catttcctaaagtgggtccaatgggaaacattacagtaataaattagatgctattatgca

SEQ ID NO: 273 - DNA, 60 bp, Homo sapiens
  source 1..60: mol_type = genomic DNA
gtggcatgtcccattatggggatgacatggccattagtaaccatggaaaccgccctgcca

SEQ ID NO: 274 - DNA, 60 bp, Homo sapiens
  source 1..60: mol_type = genomic DNA
acatgctgtagaaacagtgcacgtgcctgagtacacatgtgcacaaacccaccagacaga

SEQ ID NO: 275 - DNA, 60 bp, Homo sapiens
  source 1..60: mol_type = genomic DNA
ggagtgtatctcaatgttgcattttcagaaagataatcacccaataggctgatattagtg

SEQ ID NO: 276 - DNA, 60 bp, Homo sapiens
  source 1..60: mol_type = genomic DNA
aagcccaggtggacagccattttccatcacccctttccagctgtaatctttcatccccct

SEQ ID NO: 277 - DNA, 60 bp, Homo sapiens
  source 1..60: mol_type = genomic DNA
cccatcaggctgtacctttgccttttaaggtcttgctctattttttatgagaatcctaag

SEQ ID NO: 278 - DNA, 60 bp, Homo sapiens
  source 1..60: mol_type = genomic DNA
tctgctgtcctcctccagtgccagggatctggcaccagggcgtgggttatgaggcttcag

SEQ ID NO: 279 - DNA, 60 bp, Homo sapiens
  source 1..60: mol_type = genomic DNA
gaccctcctgggtcaagagtaattgttaactggcccttctcccatgggtccccgcgtaga

SEQ ID NO: 280 - DNA, 60 bp, Homo sapiens
  source 1..60: mol_type = genomic DNA
gggccgggcgtgacgggcagcctgcccactgccacctcttcctgcagccccaggttggca

SEQ ID NO: 281 - DNA, 60 bp, Homo sapiens
  source 1..60: mol_type = genomic DNA
aaaacacaacaatctccccactctcaataaaggaaaaaagagtaggtctttcccccccca

SEQ ID NO: 282 - DNA, 60 bp, Homo sapiens
  source 1..60: mol_type = genomic DNA
gttattgattagcactggcaactctgaaatgtggctttttatacctcaataaatctctct

SEQ ID NO: 283 - DNA, 60 bp, Homo sapiens
  source 1..60: mol_type = genomic DNA
gaagactggcttttgggctcaagggcccaagctatctggagtgataagagactggagtaa

SEQ ID NO: 284 - DNA, 60 bp, Homo sapiens
  source 1..60: mol_type = genomic DNA
aggctaggagtccttcaatctttgcacgtcaaacaggacgcttggtaccctcttccttct

SEQ ID NO: 285 - DNA, 60 bp, Homo sapiens
  source 1..60: mol_type = genomic DNA
caagaagtgcttcattactctcctgacatgtgcagccttcccctctgtctatgtaacatg

SEQ ID NO: 286 - DNA, 60 bp, Homo sapiens
  source 1..60: mol_type = genomic DNA
agtcaacttccttaatttgtaatgtaggctcagtgaaagcttcagggttgttgcccgccg

SEQ ID NO: 287 - DNA, 60 bp, Homo sapiens
  source 1..60: mol_type = genomic DNA
cttgtttacttttcttcacttcccatcgaaaacttttaatctaagttttctttttccccg

SEQ ID NO: 288 - DNA, 60 bp, Homo sapiens
  source 1..60: mol_type = genomic DNA
ttgttgcaggaagtaaacctgcttcccctctcccttgtgccctcctggatatcccacccg

SEQ ID NO: 289 - DNA, 60 bp, Homo sapiens
  source 1..60: mol_type = genomic DNA
tcgagtacagtgacccagcgggagctgtgtgtgaacgggaaagctcttggaacagtcttg

SEQ ID NO: 290 - DNA, 60 bp, Homo sapiens
  source 1..60: mol_type = genomic DNA
aggactgttgcttagaaagagagataaatgttcactgtggacatttgggagaaaatgaga

SEQ ID NO: 291 - DNA, 60 bp, Homo sapiens
  source 1..60: mol_type = genomic DNA
tttctaaccctcccccactccacttaagagctacttcacacttcccccgccctcccggag

SEQ ID NO: 292 - DNA, 60 bp, Homo sapiens
  source 1..60: mol_type = genomic DNA
gaattctcattggcttcggttaggtgaatatcgcccccttgtggtcaaacagaacgcagg

SEQ ID NO: 293 - DNA, 60 bp, Homo sapiens
  source 1..60: mol_type = genomic DNA
catctgtggctttcacgtacctcgacacacacatttgtccagggactggtatttatgcta

SEQ ID NO: 294 - DNA, 60 bp, Homo sapiens
  source 1..60: mol_type = genomic DNA
aataatgttttgaaaatagctcatcaatataggttgccaattgattttacttgacaccct

SEQ ID NO: 295 - DNA, 60 bp, Homo sapiens
  source 1..60: mol_type = genomic DNA
atctcccacactcacctggcaccaccatccgcgcggctctgcacccacagccccggcccg

SEQ ID NO: 296 - DNA, 60 bp, Homo sapiens
  source 1..60: mol_type = genomic DNA
gcgccttttgggatctcgcctcgcgagaaattgacattaacgaatgagtgaaaggagctt

SEQ ID NO: 297 - DNA, 60 bp, Homo sapiens
  source 1..60: mol_type = genomic DNA
aagggaaatgattctagactaatttagatgatttccatttaattttgagccagaattctt

SEQ ID NO: 298 - DNA, 60 bp, Homo sapiens
  source 1..60: mol_type = genomic DNA
ggaggactatgacctgtgggggctccatgctctgtttacctcacttttctctgggcttgg

SEQ ID NO: 299 - DNA, 60 bp, Homo sapiens
  source 1..60: mol_type = genomic DNA
aaagcgagctgagctggggaggttttagataaggttaaaggggcagaggcctcagtggga

SEQ ID NO: 300 - DNA, 60 bp, Homo sapiens
  source 1..60: mol_type = genomic DNA
gtttctttccctgtgtgggtttttgaggaaaacctgaggtcccctaatctgtggccacca

SEQ ID NO: 301 - DNA, 60 bp, Homo sapiens
  source 1..60: mol_type = genomic DNA
gggccgtggctgccccctcaggacgagctgggccccttggggatgggggtccgcctgacg

SEQ ID NO: 302 - DNA, 60 bp, Homo sapiens
  source 1..60: mol_type = genomic DNA
tatagattcattgaaaatcgcatcatgtaatagggaagaaaaatgttcagtgttccgccg

SEQ ID NO: 303 - DNA, 60 bp, Homo sapiens
  source 1..60: mol_type = genomic DNA
agactggacagaggagggacaggagactctggaaaaggaggtctgatgactccccaaggg

SEQ ID NO: 304 - DNA, 60 bp, Homo sapiens
  source 1..60: mol_type = genomic DNA
cccagcacttcatacccatggtctcggtgccacatcccggcaccacccccatgctcccct

SEQ ID NO: 305 - DNA, 60 bp, Homo sapiens
  source 1..60: mol_type = genomic DNA
cccctcgggggacgcggatcaggtggggaacgcccaagggaaccgaattcagccccgccg

SEQ ID NO: 306 - DNA, 60 bp, Homo sapiens
  source 1..60: mol_type = genomic DNA
gtctcccagcagaccccacacccgggtctgtgcatgccgccctgctctgcccacgcggga

SEQ ID NO: 307 - DNA, 60 bp, Homo sapiens
  source 1..60: mol_type = genomic DNA
agcaggtgatgcaggagcacaactaagacccaatggcggcccctcacccctgctcctctt

SEQ ID NO: 308 - DNA, 60 bp, Homo sapiens
  source 1..60: mol_type = genomic DNA
acttgctctgcagcaggcaaaaggaagttaactcaatccccgccccaccaccaccccccg

SEQ ID NO: 309 - DNA, 60 bp, Homo sapiens
  source 1..60: mol_type = genomic DNA
tttctaaatctaagtttctttggtgttatggatgtccccaagggaagacatccgagttct

SEQ ID NO: 310 - DNA, 60 bp, Homo sapiens
  source 1..60: mol_type = genomic DNA
cagggctgaatttccatatataggacagaaagaaagaaccccaattttttaaagaaagct

SEQ ID NO: 311 - DNA, 60 bp, Homo sapiens
  source 1..60: mol_type = genomic DNA
gaatcccatatccaggaacaattagagaagcaatcaatagttttatgaatcaggaatgct

SEQ ID NO: 312 - DNA, 60 bp, Homo sapiens
  source 1..60: mol_type = genomic DNA
ttctgctagctcccaactctgccaggtactatacacagcattttacaaagttatagccct

SEQ ID NO: 313 - DNA, 60 bp, Homo sapiens
  source 1..60: mol_type = genomic DNA
cgctctctgccctcttttagcgtaggattaagttgcagagcacgttgctgcaagctgtag

SEQ ID NO: 314 - DNA, 60 bp, Homo sapiens
  source 1..60: mol_type = genomic DNA
cagttttcgaagcacactcacctgttgtcttacttatccttaatgggggttctgcccccg

SEQ ID NO: 315 - DNA, 60 bp, Homo sapiens
  source 1..60: mol_type = genomic DNA
cggctgctgcacccttctgactcgctgggaccgcccgctgcgccgcatcccccccccccg

SEQ ID NO: 316 - DNA, 60 bp, Homo sapiens
  source 1..60: mol_type = genomic DNA
acataggaagcatgtccatttgatgcgtggtgccttatttgttgaatttggcaaaagtga

SEQ ID NO: 317 - DNA, 60 bp, Homo sapiens
  source 1..60: mol_type = genomic DNA
gttctgagcgctcccctctctggccactttttctccacgcccacccccgccccgttcccg

SEQ ID NO: 318 - DNA, 60 bp, Homo sapiens
  source 1..60: mol_type = genomic DNA
aaggtactcacgaggcgcagttgggtgcacccactcgcgggagttcccctagccgaccca

SEQ ID NO: 319 - DNA, 60 bp, Homo sapiens
  source 1..60: mol_type = genomic DNA
ttccccctcccaacctccatctctgcgctgccaggccagccccgctcttttgaattgaca

SEQ ID NO: 320 - DNA, 60 bp, Homo sapiens
  source 1..60: mol_type = genomic DNA
gggggcggggtttcctcctctcagtggggctcttctgtcccgcgctctcctcctccccca

SEQ ID NO: 321 - DNA, 60 bp, Homo sapiens
  source 1..60: mol_type = genomic DNA
agctggtcccacaccgcaccggttctgggcgcgcaggcgacagggagatctctgcacgct

SEQ ID NO: 322 - DNA, 60 bp, Homo sapiens
  source 1..60: mol_type = genomic DNA
gccatcacgtctacggacacagtccccctgcacgtccgttgccgtggggtgccaccgccg

SEQ ID NO: 323 - DNA, 60 bp, Homo sapiens
  source 1..60: mol_type = genomic DNA
agagcagctgggctcaacaacctcgcagactccctgcactccccatccaccatgcccccg

SEQ ID NO: 324 - DNA, 60 bp, Homo sapiens
  source 1..60: mol_type = genomic DNA
ggtttacacatcacttgtaaagcaggacaactttgtgcttttcatgtgcatttgtctttg

SEQ ID NO: 325 - DNA, 60 bp, Homo sapiens
  source 1..60: mol_type = genomic DNA
attattcactgcgcgcctgcgtctacaacaacaccctcaacaacgccatgcctgtgtgta

SEQ ID NO: 326 - DNA, 60 bp, Homo sapiens
  source 1..60: mol_type = genomic DNA
ctaccctgtgaatggccctgtgatactgggtgacctggggattcattttgtacccccgca

SEQ ID NO: 327 - DNA, 60 bp, Homo sapiens
  source 1..60: mol_type = genomic DNA
gagttattggagtgggggcggggggccaaacctattgatctgagcttttgtccatcccca

SEQ ID NO: 328 - DNA, 60 bp, Homo sapiens
  source 1..60: mol_type = genomic DNA
gggcgaggccggcccatgtggggttgtgtcattggtttgcaaaaagagaccccgcctttg

SEQ ID NO: 329 - DNA, 60 bp, Homo sapiens
  source 1..60: mol_type = genomic DNA
gacgcgccccggcgcatctccggagccccggggcttgcgcttccagcgcggcgagaccga

SEQ ID NO: 330 - DNA, 60 bp, Homo sapiens
  source 1..60: mol_type = genomic DNA
tcagctcttggctgcaggggaatcaagagactgcagagacaaagaacctggaacatggaa

SEQ ID NO: 331 - DNA, 60 bp, Homo sapiens
  source 1..60: mol_type = genomic DNA
tgggcttctttgtgggccagtgcccccgactctcagcatcctaaatgcatctattcacct

SEQ ID NO: 332 - DNA, 60 bp, Homo sapiens
  source 1..60: mol_type = genomic DNA
ctggccagtgtcccggctgccagcggctgggcagggaacccgaaggagcccggagcccct

SEQ ID NO: 333 - DNA, 60 bp, Homo sapiens
  source 1..60: mol_type = genomic DNA
ttccccatccggaaaggaaataaacagccatgtttccttctacgtgtcccccacgccacg

SEQ ID NO: 334 - DNA, 60 bp, Homo sapiens
  source 1..60: mol_type = genomic DNA
caggactccctccagccccttgctggccctgccctgcctctccccagggaggccctgagg

SEQ ID NO: 335 - DNA, 60 bp, Homo sapiens
  source 1..60: mol_type = genomic DNA
aagctctgggaaggaaaggggaagacgccgcttaccccttccccgccaggaattctgctg

SEQ ID NO: 336 - DNA, 60 bp, Homo sapiens
  source 1..60: mol_type = genomic DNA
acatctggcccgccccagcccgaagacagcccgtcctccctggacaatcagacgaattct

SEQ ID NO: 337 - DNA, 60 bp, Homo sapiens
  source 1..60: mol_type = genomic DNA
agagtggagctctttgagggggggcttggaacctttgtttttacctcccctggtgccccg

SEQ ID NO: 338 - DNA, 60 bp, Homo sapiens
  source 1..60: mol_type = genomic DNA
ccaaatgcctttcccagtgtaatcccacacaatggtcatccccccccactccccatcgcg

SEQ ID NO: 339 - DNA, 60 bp, Homo sapiens
  source 1..60: mol_type = genomic DNA
atacttacccctttggtttctgggtcttttggctgtttgcttttctgtccccttcccgcg

SEQ ID NO: 340 - DNA, 60 bp, Homo sapiens
  source 1..60: mol_type = genomic DNA
caagcttcatctagtgcctctaatctgtaccagatgagttttaataggaaaagtgaattt

SEQ ID NO: 341 - DNA, 60 bp, Homo sapiens
  source 1..60: mol_type = genomic DNA
atttgcactacgtcttggacgggaatcactggggcagagggcgcctgaagtagggtcccg

SEQ ID NO: 342 - DNA, 60 bp, Homo sapiens
  source 1..60: mol_type = genomic DNA
ccaaagcaaaggccaaaggtcagcgaaaggagaagggggtggggctgtcgcggggggctg

SEQ ID NO: 343 - DNA, 60 bp, Homo sapiens
  source 1..60: mol_type = genomic DNA
tactgtagcgaaagtgcgactaaggttaggcatctggatttcccccgtagccctctttca

SEQ ID NO: 344 - DNA, 60 bp, Homo sapiens
  source 1..60: mol_type = genomic DNA
agctcctattgggttgtgggcgagtatcccgggacaactcgggcctcactgcaatggtgt

SEQ ID NO: 345 - DNA, 60 bp, Homo sapiens
  source 1..60: mol_type = genomic DNA
attgtgtccctgataggaacaaaattcaacaagggccggatttgtgttcatctctgcccg

SEQ ID NO: 346 - DNA, 60 bp, Homo sapiens
  source 1..60: mol_type = genomic DNA
gctgcaacagcggcggcagcagagcggacggccctgcaacgcgcatgcgcctcgcagctt

SEQ ID NO: 347 - DNA, 60 bp, Homo sapiens
  source 1..60: mol_type = genomic DNA
gatgagcagagttcaaagggacagtgtccaagagaggggctgacctaatgccagatggga

SEQ ID NO: 348 - DNA, 60 bp, Homo sapiens
  source 1..60: mol_type = genomic DNA
gcgggggcggcgcggggcggacggaccgacagggaccgatagggacccgccggggacgcg

SEQ ID NO: 349 - DNA, 60 bp, Homo sapiens
  source 1..60: mol_type = genomic DNA
agtcaccttcagatttaattccacagacacgcccccaaacagaccctcccctttaaggca

SEQ ID NO: 350 - DNA, 60 bp, Homo sapiens
  source 1..60: mol_type = genomic DNA
tttacggttatctttgcgacttaggctcaaaagcccagcaggctcctgcagctctgagca

SEQ ID NO: 351 - DNA, 60 bp, Homo sapiens
  source 1..60: mol_type = genomic DNA
atttacctctgagtctgtgcattcccattccttcccatattaattctctcccgcgcaaca

SEQ ID NO: 352 - DNA, 60 bp, Homo sapiens
  source 1..60: mol_type = genomic DNA
catgggagttccaaagtttttctcctgatcatgagatttggtggcttcacatatttactt

SEQ ID NO: 353 - DNA, 60 bp, Homo sapiens
  source 1..60: mol_type = genomic DNA
agacagattacatagctaataaattggcaaagtggcaagaaagaaaactctctttcagcg

SEQ ID NO: 354 - DNA, 60 bp, Homo sapiens
  source 1..60: mol_type = genomic DNA
ctaccaccactccttaacaagtcaacaaagtaggagccataggggaagcaagatagggaa

SEQ ID NO: 355 - DNA, 60 bp, Homo sapiens
  source 1..60: mol_type = genomic DNA
aaataagatgtttatgagcaggtgacagggcgacagggcgctacctaatgggtcgggaga

SEQ ID NO: 356 - DNA, 60 bp, Homo sapiens
  source 1..60: mol_type = genomic DNA
acggctccccagccttcgcccccacctcccggggaggcttggggggccgagcgccccgcg

SEQ ID NO: 357 - DNA, 60 bp, Homo sapiens
  source 1..60: mol_type = genomic DNA
tgccctaaacaacttcaggctctgtaactttgcttccattgtcccctcagcctaaaatca

SEQ ID NO: 358 - DNA, 60 bp, Homo sapiens
  source 1..60: mol_type = genomic DNA
cataacacaaagaggtgaaatgagagctcataattgcatcagagggctgtgggggagcca

SEQ ID NO: 359 - DNA, 60 bp, Homo sapiens
  source 1..60: mol_type = genomic DNA
acaggagatgactatgttttatctaatgatctgactctgtggagtggtctctaggttgca

SEQ ID NO: 360 - DNA, 60 bp, Homo sapiens
  source 1..60: mol_type = genomic DNA
cacactctgccttttctttatctcccagtgccttgaaaacactttcacaaactgcccccg

SEQ ID NO: 361 - DNA, 60 bp, Homo sapiens
  source 1..60: mol_type = genomic DNA
tgccctcgcagctgggaaggagcctgactctgagaagctgctctccgccctcctcctcca

SEQ ID NO: 362 - DNA, 60 bp, Homo sapiens
  source 1..60: mol_type = genomic DNA
gggacttgaacgggcttagtgggcttcagccagcttttctccaccggttccccacgggga

SEQ ID NO: 363 - DNA, 60 bp, Homo sapiens
  source 1..60: mol_type = genomic DNA
gtagcattcattcaatagattgactgtacatgccaggcggtgcttggggctgtgaggaca

SEQ ID NO: 364 - DNA, 60 bp, Homo sapiens
  source 1..60: mol_type = genomic DNA
agagtcagagagaggagctgcggtgacagctgcttgtggctgatgagcattactggccag

SEQ ID NO: 365 - DNA, 60 bp, Homo sapiens
  source 1..60: mol_type = genomic DNA
ttgtctatcccgttggacttgtgttctctggcttcatgtttgcacatgccacctcttcat

SEQ ID NO: 366 - DNA, 60 bp, Homo sapiens
  source 1..60: mol_type = genomic DNA
agggacagtgggaaggtggtggtcccagcagggccaggtggcacccatcctgcactgcag

SEQ ID NO: 367 - DNA, 60 bp, Homo sapiens
  source 1..60: mol_type = genomic DNA
gcagagactggacatattgagggagatgaagttgtggtaacaggaaccacaacgggggaa

SEQ ID NO: 368 - DNA, 60 bp, Homo sapiens
  source 1..60: mol_type = genomic DNA
atttccccctggggcagattcttcagaatcatttgtctcccactgggagtctttttccct

SEQ ID NO: 369 - DNA, 60 bp, Homo sapiens
  source 1..60: mol_type = genomic DNA
ctggcatcatatgttatcaaatatcagctactatgctaattatcttagtcatctccctat

SEQ ID NO: 370 - DNA, 60 bp, Homo sapiens
  source 1..60: mol_type = genomic DNA
ggagcagaggagctgagggtacatccaggagttcagtggccacctgtttattcccgccaa

SEQ ID NO: 371 - DNA, 60 bp, Homo sapiens
  source 1..60: mol_type = genomic DNA
tataggcaccttggtccagggaccttccctcttctagccacttctgcccctacccgcctg

SEQ ID NO: 372 - DNA, 60 bp, Homo sapiens
  source 1..60: mol_type = genomic DNA
atgaattgctagagactctgtgtagatcagtttagcaaaagttaaaaatctccagaggga

SEQ ID NO: 373 - DNA, 60 bp, Homo sapiens
  source 1..60: mol_type = genomic DNA
ttagagttcggtgtcatgaagggtgatggacatgtgtggtccttggtgctacctgagtca

SEQ ID NO: 374 - DNA, 60 bp, Homo sapiens
  source 1..60: mol_type = genomic DNA
tgccttgagttgacaaagaagggtggtggggagtgtgcggggagcagagaaagctcatat

SEQ ID NO: 375 - DNA, 60 bp, Homo sapiens
  source 1..60: mol_type = genomic DNA
gggggttaggagggaagacatctcagtgaggctcccatcagactccctccctcctaagag

SEQ ID NO: 376 - DNA, 60 bp, Homo sapiens
  source 1..60: mol_type = genomic DNA
ttgccgcttcattttattttttagactatgtgttagaagttgtctaaaatacccacctag

SEQ ID NO: 377 - DNA, 60 bp, Homo sapiens
  source 1..60: mol_type = genomic DNA
tccccaagcgaaaagttccctgctgcagcaccacccctctcccgctgccctctcatcccg

SEQ ID NO: 378 - DNA, 60 bp, Homo sapiens
  source 1..60: mol_type = genomic DNA
gtgctgactgcaatagacgactcaaacttttgactgtgtctttctttttgaatccccctt

SEQ ID NO: 379 - DNA, 60 bp, Homo sapiens
  source 1..60: mol_type = genomic DNA
agtatctgtaactaatacaaacatgtgggaccaagtctagaagcccccaggcatagccca

SEQ ID NO: 380 - DNA, 60 bp, Homo sapiens
  source 1..60: mol_type = genomic DNA
gcgtgtggcaagcacatagcggcctttgaaacacacacagcaatatgctcagagacagca

SEQ ID NO: 381 - DNA, 60 bp, Homo sapiens
  source 1..60: mol_type = genomic DNA
ctaagctataaaccttttttctctccagcgtctaataaattcagtgctgggaataaaagt

SEQ ID NO: 382 - DNA, 60 bp, Homo sapiens
  source 1..60: mol_type = genomic DNA
tgagggtctgggggaggccggctggggtggatagattaagttttttacgagcccccccaa

SEQ ID NO: 383 - DNA, 60 bp, Homo sapiens
  source 1..60: mol_type = genomic DNA
gccttcatgggaacttagatgctttgagaagctggaaagctctggacagttccccccgct

SEQ ID NO: 384 - DNA, 60 bp, Homo sapiens
  source 1..60: mol_type = genomic DNA
gcaatagtcaattctgaatgggggatgcatagtcccgtatttttctatattctcatattt

SEQ ID NO: 385 - DNA, 60 bp, Homo sapiens
  source 1..60: mol_type = genomic DNA
gcccagggagggccgaaccccaaacacgccgggctggttctgcggccccgccccacccca

SEQ ID NO: 386 - DNA, 60 bp, Homo sapiens
  source 1..60: mol_type = genomic DNA
gaaacaggtgaggcacaggtgagtgggccaccagtcactgccttcccagcatcctttcca

SEQ ID NO: 387 - DNA, 60 bp, Homo sapiens
  source 1..60: mol_type = genomic DNA
cctcttggcctcccgagttaccaagaagatgtgacatcaggcccaggaccctttcttcat

SEQ ID NO: 388 - DNA, 60 bp, Homo sapiens
  source 1..60: mol_type = genomic DNA
ctagacttgctcctgcaataggcaatttctctgcagactcagacaaggaagatccgccct

SEQ ID NO: 389 - DNA, 60 bp, Homo sapiens
  source 1..60: mol_type = genomic DNA
aaggaggtgataagtccatatcagtcaatttagttttatttgtgctgcagaaacatagga

SEQ ID NO: 390 - DNA, 60 bp, Homo sapiens
  source 1..60: mol_type = genomic DNA
tcatcacaaggcataactaaaatacaatcccttaatactcactcccccacagcccccccg

SEQ ID NO: 391 - DNA, 60 bp, Homo sapiens
  source 1..60: mol_type = genomic DNA
gaactggtctcagggaagtggtgcccctcccctcctgtgagggccgactccccccaacca

SEQ ID NO: 392 - DNA, 60 bp, Homo sapiens
  source 1..60: mol_type = genomic DNA
tcactgtttccacctcgtgtgcccgccacgctgtcttcctgccgctggtgaagtctgtct

SEQ ID NO: 393 - DNA, 60 bp, Homo sapiens
  source 1..60: mol_type = genomic DNA
gtcagtgaggatgtcgcctgttgagggaaaaatagtagctgttgccatattcctttaact

SEQ ID NO: 394 - DNA, 60 bp, Homo sapiens
  source 1..60: mol_type = genomic DNA
ctgatggcagcttggccggtggcctcgggctcttcctacaccagaccacctccctcccaa

SEQ ID NO: 395 - DNA, 60 bp, Homo sapiens
  source 1..60: mol_type = genomic DNA
tttctggtctagtcacgatgcatgacgtgatctggtaagcttgcataaagtagccgaaca

SEQ ID NO: 396 - DNA, 60 bp, Homo sapiens
  source 1..60: mol_type = genomic DNA
cagcccttgccctgggggagcatcttgagggggccgagttgagtcagtgggaagagcttg

SEQ ID NO: 397 - DNA, 60 bp, Homo sapiens
  source 1..60: mol_type = genomic DNA
gtgaactccacttcccctccctttctcagctcctccagtgtcagaggctggcgctgtgca

SEQ ID NO: 398 - DNA, 60 bp, Homo sapiens
  source 1..60: mol_type = genomic DNA
cataggataattccatcagctgcattcccttctgctactgaaaatgtgattttttgatca

SEQ ID NO: 399 - DNA, 60 bp, Homo sapiens
  source 1..60: mol_type = genomic DNA
gaatgtttcaggaagagtaggtgtttcaggaacagattcagacgttactatccccgggcg

SEQ ID NO: 400 - DNA, 60 bp, Homo sapiens
  source 1..60: mol_type = genomic DNA
atgaggttgtcacagattgtcattaagacctcagtaaaacaatgaagacattattgggca

SEQ ID NO: 401 - DNA, 60 bp, Homo sapiens
  source 1..60: mol_type = genomic DNA
gtacaagccttcgtgtaacatcaagtttatggtggcagctttaggtcaaactcttcaaga

SEQ ID NO: 402 - DNA, 60 bp, Homo sapiens
  source 1..60: mol_type = genomic DNA
aagtgcatgtgggtgccgatgtgtttaactgagaaatgtgagtgttacaatatatttgta

SEQ ID NO: 403 - DNA, 60 bp, Homo sapiens
  source 1..60: mol_type = genomic DNA
cagcggagcatgtttccctgtcatcccacatgactctggctgagtgactcctctctggga

SEQ ID NO: 404 - DNA, 60 bp, Homo sapiens
  source 1..60: mol_type = genomic DNA
ctggggcacccatagcacttgctggtcataaaagagtcagtaacatttctatgtgtcctt

SEQ ID NO: 405 - DNA, 60 bp, Homo sapiens
  source 1..60: mol_type = genomic DNA
gcaccacagatggttctgggttggctggcatcatgccaccgccctccaaacccccttctg

SEQ ID NO: 406 - DNA, 60 bp, Homo sapiens
  source 1..60: mol_type = genomic DNA
gccctccagcactcttgcctgcaagggccacttctacttccgggtcactgtctggctcca

SEQ ID NO: 407 - DNA, 60 bp, Homo sapiens
  source 1..60: mol_type = genomic DNA
agattgaccccctcctttatcaattactcaaacatccaccccccccctccccacccacca

SEQ ID NO: 408 - DNA, 60 bp, Homo sapiens
  source 1..60: mol_type = genomic DNA
cccgcagctcaggggtttttcagtgggccacccccgctaacacgcctcccccaaggtctt

SEQ ID NO: 409 - DNA, 60 bp, Homo sapiens
  source 1..60: mol_type = genomic DNA
gagctagcagaaaatattaaggagctgattcctccaacttgccccctgctggggacagga

SEQ ID NO: 410 - DNA, 60 bp, Homo sapiens
  source 1..60: mol_type = genomic DNA
tgggcttccttcctgctctttggacacctggaacgtatttctttcacagctttgtagacg

SEQ ID NO: 411 - DNA, 60 bp, Homo sapiens
  source 1..60: mol_type = genomic DNA
gaaagcggtgaccgcgacgtgcggcgggggcgggtggccctgtcgcctccccttctcaga

SEQ ID NO: 412 - DNA, 60 bp, Homo sapiens
  source 1..60: mol_type = genomic DNA
gggttggagggcttgggtggtggtgagtggacgtggtacagtttaccagcagtctaagcg

SEQ ID NO: 413 - DNA, 60 bp, Homo sapiens
  source 1..60: mol_type = genomic DNA
catattagaaaaatgaagttgttcattacaaaccatcctttcaacactggtctccaccta

SEQ ID NO: 414 - DNA, 60 bp, Homo sapiens
  source 1..60: mol_type = genomic DNA
cttcctctcttctttgactatctatcacagtttaacttcattggttctctgcagcttcct

SEQ ID NO: 415 - DNA, 60 bp, Homo sapiens
  source 1..60: mol_type = genomic DNA
ttgggtcctttttaagtactttttttctcttctcccccgccaccccccttccccccgcca

SEQ ID NO: 416 - DNA, 60 bp, Homo sapiens
  source 1..60: mol_type = genomic DNA
cagccttattataagcacaccgttgtgtggtcctcagtagtgactagccaccgccccccg

SEQ ID NO: 417 - DNA, 60 bp, Homo sapiens
  source 1..60: mol_type = genomic DNA
tggccttgatttgtgcaagatccaaaaggaaaagaagacagagtcagaggcatggaataa

SEQ ID NO: 418 - DNA, 60 bp, Homo sapiens
  source 1..60: mol_type = genomic DNA
gcatcattattttccaattttaggcttatcaaatctgagagaatgcaggacaaatcccca

SEQ ID NO: 419 - DNA, 60 bp, Homo sapiens
  source 1..60: mol_type = genomic DNA
cagaaactttgcgtctctaatggaaaccaagccgcgcgccagttccctcctcccccgccg

SEQ ID NO: 420 - DNA, 60 bp, Homo sapiens
  source 1..60: mol_type = genomic DNA
ttgtgattcagatctgctaatttctatttgcctgggagaaattttaagagtctcatcgca

SEQ ID NO: 421 - DNA, 60 bp, Homo sapiens
  source 1..60: mol_type = genomic DNA
gtgagggtgcagacccaagtgaggttcagcagtcccaccaggctccatcaggagccagcg

SEQ ID NO: 422 - DNA, 60 bp, Homo sapiens
  source 1..60: mol_type = genomic DNA
aaagaaacgaaagatttactgtctttaaagaagacagcagtagcttgtctgcacctccca

SEQ ID NO: 423 - DNA, 60 bp, Homo sapiens
  source 1..60: mol_type = genomic DNA
ccccactgctcaacggcatgcagccttggcccagctcccatcacagggatgccctccctg

SEQ ID NO: 424 - DNA, 60 bp, Homo sapiens
  source 1..60: mol_type = genomic DNA
gaatgacacgtttctccccgtcacgtgcagatgtggcaaccaacgtccaaggtgggaggg

SEQ ID NO: 425 - DNA, 60 bp, Homo sapiens
  source 1..60: mol_type = genomic DNA
ttcccctctgtggtgcaggcttgggtcaggacacagctctgagcccccacggacactgag

SEQ ID NO: 426 - DNA, 60 bp, Homo sapiens
  source 1..60: mol_type = genomic DNA
gagcaagagcagcttctttttcaccatcagcccacaaagaacctgccaagtgcaagaaga

SEQ ID NO: 427 - DNA, 60 bp, Homo sapiens
  source 1..60: mol_type = genomic DNA
gtccctcagcttccatggcaaagctgcctctgctccagccttagccctgcccccccgccg

SEQ ID NO: 428 - DNA, 60 bp, Homo sapiens
  source 1..60: mol_type = genomic DNA
aagcagtggtagcaaataaagcaaattgagtgttattgccaggacatgtgttacaggcta

SEQ ID NO: 429 - DNA, 60 bp, Homo sapiens
  source 1..60: mol_type = genomic DNA
gggcccttctgcaggagagaagagggaatgtgctgaatgagttaaagtgccctttgtcca

SEQ ID NO: 430 - DNA, 60 bp, Homo sapiens
  source 1..60: mol_type = genomic DNA
cagagaggaaggaaaagccacacatacaatcagtacagctccatctgaataaaggtagcg

SEQ ID NO: 431 - DNA, 60 bp, Homo sapiens
  source 1..60: mol_type = genomic DNA
tggtgagctgcagccactgaaagaagtcccaagatcagaatgtagatcagaaaagagtga

SEQ ID NO: 432 - DNA, 60 bp, Homo sapiens
  source 1..60: mol_type = genomic DNA
atgcctcaccctctagtctcatgactatgacacatgagacggtgttccgctgtacctctg

SEQ ID NO: 433 - DNA, 60 bp, Homo sapiens
  source 1..60: mol_type = genomic DNA
cgacgttctgttaaacaaaacgtaggtgtatggtacgtttgtcttcccccgcccgcaccg

SEQ ID NO: 434 - DNA, 60 bp, Homo sapiens
  source 1..60: mol_type = genomic DNA
ctgggttgtgaggcactgagggtagcacgagcttccagcagccttcacttcacccccccg

SEQ ID NO: 435 - DNA, 60 bp, Homo sapiens
  source 1..60: mol_type = genomic DNA
ataaccccacaaattcttaacaaccattgattactaattccacctgcacaatttccatga

SEQ ID NO: 436 - DNA, 60 bp, Homo sapiens
  source 1..60: mol_type = genomic DNA
caaaaccatttgtcaaaagaattccgagtgcctccaacaagtgtggtggtctcctagccg

SEQ ID NO: 437 - DNA, 60 bp, Homo sapiens
  source 1..60: mol_type = genomic DNA
ccctctggataagctgagtgcttgttcctgcaccttggctcacacgactgctccatggcg

SEQ ID NO: 438 - DNA, 60 bp, Homo sapiens
  source 1..60: mol_type = genomic DNA
ttgactaaggatctacacagatgatggtgctacttattatgatggaaaaaggacaggctg

SEQ ID NO: 439 - DNA, 60 bp, Homo sapiens
  source 1..60: mol_type = genomic DNA
gttttgaagcagccctctcggaacctggtcactatagcctgtggggggtactctcaggag

SEQ ID NO: 440 - DNA, 60 bp, Homo sapiens
  source 1..60: mol_type = genomic DNA
aaatctgaccatggagagagaattgggggcacagacctttctttgagtgtcttcaagcca

SEQ ID NO: 441 - DNA, 60 bp, Homo sapiens
  source 1..60: mol_type = genomic DNA
gcgcaggcgcgatgccctcccccgagggcgtggccctatgacggcaccggggtcgctccg

SEQ ID NO: 442 - DNA, 60 bp, Homo sapiens
  source 1..60: mol_type = genomic DNA
ccccctcacacaaccacacacctcccgcccgtctgctctacgggaagccgaggaggtcag

SEQ ID NO: 443 - DNA, 60 bp, Homo sapiens
  source 1..60: mol_type = genomic DNA
tagggcaaactgtaggtattcagcagtacttgttttttttgtgcttggattgaggtgttt

SEQ ID NO: 444 - DNA, 60 bp, Homo sapiens
  source 1..60: mol_type = genomic DNA
tgggccaccagccccgatgttgaagagccgggtcacctttcctgagggccaacacacaca

SEQ ID NO: 445 - DNA, 60 bp, Homo sapiens
  source 1..60: mol_type = genomic DNA
atttccctgtgaaggtctcatcaagtccttcttgtgccttctccttgagtgggtctcaga

SEQ ID NO: 446 - DNA, 60 bp, Homo sapiens
  source 1..60: mol_type = genomic DNA
gtggggctttgtcttgtctctagagaagggaactaagtgggtagacaacaggttctaaga

SEQ ID NO: 447 - DNA, 60 bp, Homo sapiens
  source 1..60: mol_type = genomic DNA
cgcggcgcactgtagacctggggttaagtgccagttgtcattttctcctccaaaggctcg

SEQ ID NO: 448 - DNA, 60 bp, Homo sapiens
  source 1..60: mol_type = genomic DNA
tcttaactgccgtttctcgtctaaattccatccattcgcccttgtctgccactctgccta

SEQ ID NO: 449 - DNA, 60 bp, Homo sapiens
  source 1..60: mol_type = genomic DNA
ctcattttggtcaagcttctggaagacaaagtttaccttgcccgcttctgtacacacaca

SEQ ID NO: 450 - DNA, 60 bp, Homo sapiens
  source 1..60: mol_type = genomic DNA
tccctcttttctctgccctctttctcctcaagatcccggggtggggttgctgagagagca

SEQ ID NO: 451 - DNA, 60 bp, Homo sapiens
  source 1..60: mol_type = genomic DNA
ggtattttaaagcaaaatcgtgtattttcatatcttattattcatttgagtaagagcgtt

SEQ ID NO: 452 - DNA, 60 bp, Homo sapiens
  source 1..60: mol_type = genomic DNA
tgcggaagacccctggaagtagaccccaaggattgggttttcagggactcttggtgccca

SEQ ID NO: 453 - DNA, 60 bp, Homo sapiens
  source 1..60: mol_type = genomic DNA
tcaccctgctgtccctcggcctggcctgggcacactccttggtgacagtgcccctgcacg

SEQ ID NO: 454 - DNA, 60 bp, Homo sapiens
  source 1..60: mol_type = genomic DNA
ggccctgccacagggacaaaggggccaccctgatgagggacaggaatctcactgacgtcg

SEQ ID NO: 455 - DNA, 60 bp, Homo sapiens
  source 1..60: mol_type = genomic DNA
catgaagtgagccgtgcaccccatctcggcaccaccacaccctcctcagccgcccaggtg

SEQ ID NO: 456 - DNA, 60 bp, Homo sapiens
  source 1..60: mol_type = genomic DNA
aacactctcctgtggtcacaaaagccagtgtctcttttcaatatggctctttattccccg

SEQ ID NO: 457 - DNA, 60 bp, Homo sapiens
  source 1..60: mol_type = genomic DNA
gatagagaggggatgtgtgtccttgtgtctcctgggtctctgctgccacccaaccccccg

SEQ ID NO: 458 - DNA, 60 bp, Homo sapiens
  source 1..60: mol_type = genomic DNA
catccagttgccacgtttggtgtcagcactattgtttttacagcttacattcccgccccg

SEQ ID NO: 459 - DNA, 60 bp, Homo sapiens
  source 1..60: mol_type = genomic DNA
caaccccaaaacgccttgttagaaactatttcgagtccgaatacccataattggctttaa

SEQ ID NO: 460 - DNA, 60 bp, Homo sapiens
  source 1..60: mol_type = genomic DNA
gctaccctggcagtcactgacacctgcctctcttgaaagggctgctaggtcccaccacca

SEQ ID NO: 461 - DNA, 60 bp, Homo sapiens
  source 1..60: mol_type = genomic DNA
acagcacttgccgggctagctctgaactcagagtggcatcagaggcaccgccccccccgt

SEQ ID NO: 462 - DNA, 60 bp, Homo sapiens
  source 1..60: mol_type = genomic DNA
cgcttggcaagagcccttagcaactgcccagatgtgtccaaaagttgtttacaaagaccg

SEQ ID NO: 463 - DNA, 60 bp, Homo sapiens
  source 1..60: mol_type = genomic DNA
ggtgcaatttcttgaatcctagttctgtagaagaaacactctacccccccgcccccccca

SEQ ID NO: 464 - DNA, 60 bp, Homo sapiens
  source 1..60: mol_type = genomic DNA
gtgcaattgaccagacacatcgacccttccctcttgccccatccctgcttctgagtgtca

SEQ ID NO: 465 - DNA, 60 bp, Homo sapiens
  source 1..60: mol_type = genomic DNA
aggcctatcgcgtaactcggtctccgcgagaaggaaggaagtcacgtgaacacgcaggcg

SEQ ID NO: 466 - DNA, 60 bp, Homo sapiens
  source 1..60: mol_type = genomic DNA
aggttggaggacaatggttctgaggccagccccagaaccttggagagcgccacagacaca

SEQ ID NO: 467 - DNA, 60 bp, Homo sapiens
  source 1..60: mol_type = genomic DNA
cttacagggaacacttggtcgaaaaacagtgttttctaaatttatattacagttcccact

SEQ ID NO: 468 - DNA, 60 bp, Homo sapiens
  source 1..60: mol_type = genomic DNA
cagcaaaacctgacctctctttgtgttacctgagtcttgacgaagaagactgaggaaagg

SEQ ID NO: 469 - DNA, 60 bp, Homo sapiens
  source 1..60: mol_type = genomic DNA
atatgaacacagaaactgcaatggcttttggacgctattcaggtgtgcaaatagtatcta

SEQ ID NO: 470 - DNA, 60 bp, Homo sapiens
  source 1..60: mol_type = genomic DNA
ccatgtaatttgcttctctttacagtgcattacgtgcaccattgtaagtgctggaacccg

SEQ ID NO: 471 - DNA, 60 bp, Homo sapiens
  source 1..60: mol_type = genomic DNA
gcctcttatcccaattcacagccttgtcggcagcctcttgctcacagcacagaagggaga

SEQ ID NO: 472 - DNA, 60 bp, Homo sapiens
  source 1..60: mol_type = genomic DNA
agattccaaatcactgctactcacttagatagcaggtggggagtataagggggtgtatga

SEQ ID NO: 473 - DNA, 60 bp, Homo sapiens
  source 1..60: mol_type = genomic DNA
agcttgtaaggtgcagcagccaggcggctccagctcataggcgcccccgcccccccccca

SEQ ID NO: 474 - DNA, 60 bp, Homo sapiens
  source 1..60: mol_type = genomic DNA
cacactgtcacatcagcctaagggcactcagttgtgtttagggtttgggggtaagtgtgt

SEQ ID NO: 475 - DNA, 60 bp, Homo sapiens
  source 1..60: mol_type = genomic DNA
gccaggcagttcaggccaaatctcggagggatgcagcctgggcatccgtgtgtcaaccct

SEQ ID NO: 476 - DNA, 60 bp, Homo sapiens
  source 1..60: mol_type = genomic DNA
actgcttgtcccctcatccgcacccccagctcatgtctgtggcacggcctgggtgcagga

SEQ ID NO: 477 - DNA, 60 bp, Homo sapiens
  source 1..60: mol_type = genomic DNA
ctcctgggggcacctcacccacaggccccaccttggtgtcctcggtcgccctggttggcg

SEQ ID NO: 478 - DNA, 60 bp, Homo sapiens
  source 1..60: mol_type = genomic DNA
gagcaacacagtcctggcccagctcagaccccaaggtggttcccaaggggggtctcagct

SEQ ID NO: 479 - DNA, 60 bp, Homo sapiens
  source 1..60: mol_type = genomic DNA
agcagtaaaataagaagaaggatcccatgagtatttctgtcctgtcttcaggaatgaact

SEQ ID NO: 480 - DNA, 60 bp, Homo sapiens
  source 1..60: mol_type = genomic DNA
ctggaatttaattgccatcgtctttgattttgtgacatttctgcttggaagtgtgaacta

SEQ ID NO: 481 - DNA, 60 bp, Homo sapiens
  source 1..60: mol_type = genomic DNA
ggaatgtttcttttggctgagccaaaagacaataggtttccagggcacttggcacccaaa

SEQ ID NO: 482 - DNA, 60 bp, Homo sapiens
  source 1..60: mol_type = genomic DNA
aacgctacttcacggccgggacagacccgggagctctaacccggacgcggcccccacctg

SEQ ID NO: 483 - DNA, 60 bp, Homo sapiens
  source 1..60: mol_type = genomic DNA
taggtactgctgttgggctgtcccctacttcttgcatgttaaatgtcatgatcatggttt

SEQ ID NO: 484 - DNA, 60 bp, Homo sapiens
  source 1..60: mol_type = genomic DNA
cgacagaaaaaaaccccaaggtacaatctacagggaaactcatcttgacccccccccctg

SEQ ID NO: 485 - DNA, 60 bp, Homo sapiens
  source 1..60: mol_type = genomic DNA
gcgtggacctgcaggccgtatgcctcgactgtcctcatggagggggtcccacatgcccaa

SEQ ID NO: 486 - DNA, 60 bp, Homo sapiens
  source 1..60: mol_type = genomic DNA
tctccaccccaccaacttctagatacatactttcccaacatgcctccaacgcccccccct

SEQ ID NO: 487 - DNA, 60 bp, Homo sapiens
  source 1..60: mol_type = genomic DNA
ccctggaggcttctgctaagtccctcattggaaccaagaacccgcgcttctgtccccgcg

SEQ ID NO: 488 - DNA, 60 bp, Homo sapiens
  source 1..60: mol_type = genomic DNA
ccacttagcagctctggggtctccaggggatggataactaaggcagggctagtacccgct

SEQ ID NO: 489 - DNA, 60 bp, Homo sapiens
  source 1..60: mol_type = genomic DNA
cagccagtctttgcacttgagaaacacaacacacagtatctatcattctttgaagaacca

SEQ ID NO: 490 - DNA, 60 bp, Homo sapiens
  source 1..60: mol_type = genomic DNA
tgtggcgtgagctgcgggtctgcaggggccgggcagggtgagaggaaccaaggatgagca

SEQ ID NO: 491 - DNA, 60 bp, Homo sapiens
  source 1..60: mol_type = genomic DNA
attcacctctgcctttcatcagcactgacagagcccacctgcactctattggatgagaga

SEQ ID NO: 492 - DNA, 60 bp, Homo sapiens
  source 1..60: mol_type = genomic DNA
ggtgggggggaaaacaataaggtgcccatgcgcatgcgcacaaccacactaccgtcccca

SEQ ID NO: 493 - DNA, 60 bp, Homo sapiens
  source 1..60: mol_type = genomic DNA
ccagcccctggacacaagttggtctgggattgggcaaaggggagatcccgggagctcctg

SEQ ID NO: 494 - DNA, 60 bp, Homo sapiens
  source 1..60: mol_type = genomic DNA
agtcatagaaccgtctgtggggaggcagagggccagaggatgcagcaggcccctggagcg

SEQ ID NO: 495 - DNA, 60 bp, Homo sapiens
  source 1..60: mol_type = genomic DNA
tcagtctgacacctgctcttttcaaacccttttgacatgatctaaataaatctctgaaat

SEQ ID NO: 496 - DNA, 60 bp, Homo sapiens
  source 1..60: mol_type = genomic DNA
tctccccagaatcatggaccttaatggcactgagataatgacttccacccaatctacacg

SEQ ID NO: 497 - DNA, 60 bp, Homo sapiens
  source 1..60: mol_type = genomic DNA
caactaacccaaggtctcaccatgttaaaatgccggcggactctacggcgttttgtagat

SEQ ID NO: 498 - DNA, 60 bp, Homo sapiens
  source 1..60: mol_type = genomic DNA
cgtgctctttgtagagttgcagtctcttggctcttcccgctgaccgtcccccttttctga

SEQ ID NO: 499 - DNA, 60 bp, Homo sapiens
  source 1..60: mol_type = genomic DNA
cctcttggcactctgatttatccagaatgcacctaatcaccctctacacatgcacacccg

SEQ ID NO: 500 - DNA, 60 bp, Homo sapiens
  source 1..60: mol_type = genomic DNA
cacatttgcatattgggaacagtgtatttgtgaagagactctcaggccttccagggacca

SEQ ID NO: 501 - DNA, 60 bp, Homo sapiens
  source 1..60: mol_type = genomic DNA
attaggatagaggaaaattagtgaacttggctaatcgaaatcaaagagcttcccctccca

SEQ ID NO: 502 - DNA, 60 bp, Homo sapiens
  source 1..60: mol_type = genomic DNA
tgagggtgctgacttggtggggcaattaggtactcaagggtgagaaaggaggcatcacag

SEQ ID NO: 503 - DNA, 60 bp, Homo sapiens
  source 1..60: mol_type = genomic DNA
ccccctaataccagcaccactaggaatggtggtcatcaaagtcaccccccttcttcttta

SEQ ID NO: 504 - DNA, 60 bp, Homo sapiens
  source 1..60: mol_type = genomic DNA
ttctgtgctttcagaatcccaaataaacgcacagcattgggaaactcttaattttaaact

SEQ ID NO: 505 - DNA, 60 bp, Homo sapiens
  source 1..60: mol_type = genomic DNA
aagaaagacatttacacaatggcacagcaggatggatcattttggaggctctggggaacg

SEQ ID NO: 506 - DNA, 60 bp, Homo sapiens
  source 1..60: mol_type = genomic DNA
agttctgaactcaggatgcagccttcctgctacctgtcccccaggactcatatcctcctg

SEQ ID NO: 507 - DNA, 60 bp, Homo sapiens
  source 1..60: mol_type = genomic DNA
ctcatccgggctgtgggggacctcagagcgcagaaggtggagcgaaaggaccaaggacca

SEQ ID NO: 508 - DNA, 60 bp, Homo sapiens
  source 1..60: mol_type = genomic DNA
gctaccgctcaggtgctgcaggcacagcccgagaaaccgcagcactacacgtacgtagag

SEQ ID NO: 509 - DNA, 60 bp, Homo sapiens
  source 1..60: mol_type = genomic DNA
cctctgcctctgtttcccatgtgtggcagtcacctgtgacacctgggcctgggaggtgtg

SEQ ID NO: 510 - DNA, 60 bp, Homo sapiens
  source 1..60: mol_type = genomic DNA
tgcgccagcccagcagtgctgtgcacctggagcccaacctgccagggaaagactttcctg

SEQ ID NO: 511 - DNA, 60 bp, Homo sapiens
  source 1..60: mol_type = genomic DNA
ccccaccctaggggctaagggtgggaagcggcatccatgaggctggggagaataaggaca

SEQ ID NO: 512 - DNA, 60 bp, Homo sapiens
  source 1..60: mol_type = genomic DNA
agaaccagttgaacttttgctaggctgcaggtccccacagaacagcaatttcaaatcttg

SEQ ID NO: 513 - DNA, 60 bp, Homo sapiens
  source 1..60: mol_type = genomic DNA
cattacgaatcccgtttccagctggaaaaacaagcgccaggaaagtgcatttccccccca

SEQ ID NO: 514 - DNA, 60 bp, Homo sapiens
  source 1..60: mol_type = genomic DNA
agcaggcgctctctgcaagacacggagcaggtcagtaccctggagaccaccctcgccgca

SEQ ID NO: 515 - DNA, 60 bp, Homo sapiens
  source 1..60: mol_type = genomic DNA
ggagtggcccctgagtcatttgaatacatcgaagcccacggcacaggcaccaaggtgatg

SEQ ID NO: 516 - DNA, 60 bp, Homo sapiens
  source 1..60: mol_type = genomic DNA
gttgaagcccaggagctgcccgatggccctgcacaggcacaaggagatagggttcctctt

SEQ ID NO: 517 - DNA, 60 bp, Homo sapiens
  source 1..60: mol_type = genomic DNA
gcaattcttcttggacttacacagacaggtcatcttcactttcattttactaaaatagca

SEQ ID NO: 518 - DNA, 60 bp, Homo sapiens
  source 1..60: mol_type = genomic DNA
gcgagagacaagagaagaatggaccctttcagctaccagagccactcggccttccactga

SEQ ID NO: 519 - DNA, 60 bp, Homo sapiens
  source 1..60: mol_type = genomic DNA
agggatttttttccttctctaaacctttacttcgcctagctggcacttcctttctcactt

SEQ ID NO: 520 - DNA, 60 bp, Homo sapiens
  source 1..60: mol_type = genomic DNA
gagggggagattttcagaatgccatttcaaagcaatcaaatgcaaagctagaaaagacga

SEQ ID NO: 521 - DNA, 60 bp, Homo sapiens
  source 1..60: mol_type = genomic DNA
actatcacaggcaaaggacaagggcaaaagtcttagatgatagggtaactggggtaattg

SEQ ID NO: 522 - DNA, 60 bp, Homo sapiens
  source 1..60: mol_type = genomic DNA
tgtttaatattgaatatgcaattaatagaaagatgtttaggtttggctttccctacacct

SEQ ID NO: 523 - DNA, 60 bp, Homo sapiens
  source 1..60: mol_type = genomic DNA
tttgaaaacagatcaatagatacacactcttgagcatctgaactggaccatgatttctta

SEQ ID NO: 524 - DNA, 60 bp, Homo sapiens
  source 1..60: mol_type = genomic DNA
ttttgactgggcctgtccctttaagtggtaagcagccccctggcccagcacctcagagaa

SEQ ID NO: 525 - DNA, 60 bp, Homo sapiens
  source 1..60: mol_type = genomic DNA
aatactgagaaaaccccgggagaggactgacttgcaggtgactggagcaggaggaaccta

SEQ ID NO: 526 - DNA, 60 bp, Homo sapiens
  source 1..60: mol_type = genomic DNA
taaggctctgggggcatcatcctgaaagcacgcttagggacgggggttgtggggtggacg

SEQ ID NO: 527 - DNA, 60 bp, Homo sapiens
  source 1..60: mol_type = genomic DNA
aaatagtctcttatgtttgtctatgtgtctccggcatttgaactgacatttcccccaccg

SEQ ID NO: 528 - DNA, 60 bp, Homo sapiens
  source 1..60: mol_type = genomic DNA
tgctactggcacgtctgaagcttgaggcatggtacaaaaagtaatagcttgcgcttgaaa

SEQ ID NO: 529 - DNA, 60 bp, Homo sapiens
  source 1..60: mol_type = genomic DNA
cgagaagcccctgtggacgcacaggtggcctcgtgacacccccaggggaggcgccccaga

SEQ ID NO: 530 - DNA, 60 bp, Homo sapiens
  source 1..60: mol_type = genomic DNA
cggagaaactgaggccgggacaggccgcagagcaggggcccggctccgctcctagccccg

SEQ ID NO: 531 - DNA, 60 bp, Homo sapiens
  source 1..60: mol_type = genomic DNA
agttactgtaagtggcttccgggtctgcgcgcacagtggcggatgatgtttttttttcct

SEQ ID NO: 532 - DNA, 60 bp, Homo sapiens
  source 1..60: mol_type = genomic DNA
atcaaccagatgattaaacgttgtattaaaaagaccccgtgtaaacctgagcccccccgt

SEQ ID NO: 533 - DNA, 60 bp, Homo sapiens
  source 1..60: mol_type = genomic DNA
aagcccagggaccttggtttgtttcttctggcctgtctacagatgtccttaaattctgct

SEQ ID NO: 534 - DNA, 60 bp, Homo sapiens
  source 1..60: mol_type = genomic DNA
gcttgcgtgcacgtggaggtggcggaggacggaggcggaggaaagagtccccagccgccg

SEQ ID NO: 535 - DNA, 60 bp, Homo sapiens
  source 1..60: mol_type = genomic DNA
ttcccgatccaccccagcttccgggccccgagcccccccgccgcagctcccggcttggcg

SEQ ID NO: 536 - DNA, 60 bp, Homo sapiens
  source 1..60: mol_type = genomic DNA
gggccggtaccaagtcacaccgcccccgggtacggggctcccgggccgccgtcccctgtg

SEQ ID NO: 537 - DNA, 60 bp, Homo sapiens
  source 1..60: mol_type = genomic DNA
ggcagccaaagccacaacttggaagatggggctgcacctgccaacgaagacgggaaatga

SEQ ID NO: 538 - DNA, 60 bp, Homo sapiens
  source 1..60: mol_type = genomic DNA
tcaacccccccaaggatggctgctgggcggggggagtgcacgcgcccgcgtgtcccaccg

SEQ ID NO: 539 - DNA, 60 bp, Homo sapiens
  source 1..60: mol_type = genomic DNA
gtggggggtggcatcactgggaagagagagggaagggtggtctctggctccatgtccctg

SEQ ID NO: 540 - DNA, 60 bp, Homo sapiens
  source 1..60: mol_type = genomic DNA
cgcaccctgcctggaccctggcgttctgagagtccaggatgagccatgggaagaaagagg

SEQ ID NO: 541 - DNA, 60 bp, Homo sapiens
  source 1..60: mol_type = genomic DNA
atcttgtggaacactcagcaacctctctagcaatagctgaaaaaggagatatactggaaa

SEQ ID NO: 542 - DNA, 60 bp, Homo sapiens
  source 1..60: mol_type = genomic DNA
tgggtctaggacagggtctgcctcacagccaggccgcacacttctctcctgtaaaccgcg

SEQ ID NO: 543 - DNA, 60 bp, Homo sapiens
  source 1..60: mol_type = genomic DNA
accagcatctcagacaatgagcctctcctggcacctgtcgctctgtgcccctccctgccg

SEQ ID NO: 544 - DNA, 60 bp, Homo sapiens
  source 1..60: mol_type = genomic DNA
gggaacattatttccctttggtcttttggtgcctagttgatttgcaggcccgcgcccccg

SEQ ID NO: 545 - DNA, 60 bp, Homo sapiens
  source 1..60: mol_type = genomic DNA
cagcacatggtgttggggaagtgacgcaggggacgccagggggctggcagtctgtcccct

SEQ ID NO: 546 - DNA, 60 bp, Homo sapiens
  source 1..60: mol_type = genomic DNA
ttaatgccacccccgcagccgagcctcctgtttgcgtcagagttaagggtgagatccccg

SEQ ID NO: 547 - DNA, 60 bp, Homo sapiens
  source 1..60: mol_type = genomic DNA
gggcacttacaagacaggcggcgtgtcttctgcacaaagacacacacccacagtctcggg

SEQ ID NO: 548 - DNA, 60 bp, Homo sapiens
  source 1..60: mol_type = genomic DNA
agagctgcgacaacttgcactgtgggctcctccttcctgtgtgggaccctggggcctagg

SEQ ID NO: 549 - DNA, 60 bp, Homo sapiens
  source 1..60: mol_type = genomic DNA
ccctctgtcaggctggtgggagggggctccgtctgccatctccctcacccgccccccctt

SEQ ID NO: 550 - DNA, 60 bp, Homo sapiens
  source 1..60: mol_type = genomic DNA
ggccaggcagagaccctgtgccctcctaaatcggcccttcgctctggttttcattctgaa

SEQ ID NO: 551 - DNA, 60 bp, Homo sapiens
  source 1..60: mol_type = genomic DNA
cttctgggaacggggagggtggtctgtgtgtctccgaccccgctggggctctgaggacca

SEQ ID NO: 552 - DNA, 60 bp, Homo sapiens
  source 1..60: mol_type = genomic DNA
cctgaggccaggctccggacccttccccaccgagacccacgccgattttaagcaaccacg

SEQ ID NO: 553 - DNA, 60 bp, Homo sapiens
  source 1..60: mol_type = genomic DNA
caagagattcatacaccgggacctggcggccaggaactgcatgtgagtgcctttcaggga

SEQ ID NO: 554 - DNA, 60 bp, Homo sapiens
  source 1..60: mol_type = genomic DNA
actaaagagggggcctggctccagagctactcccagtgagaagggtgggatccccggcct

SEQ ID NO: 555 - DNA, 60 bp, Homo sapiens
  source 1..60: mol_type = genomic DNA
aggctctgtgccctgattccctgacacccccatatttgtaccactgggcattgtccctgg

SEQ ID NO: 556 - DNA, 60 bp, Homo sapiens
  source 1..60: mol_type = genomic DNA
cccctcggagattaaggaatacagttccccaacttctgccttctgagaatcagaacatca

SEQ ID NO: 557 - DNA, 60 bp, Homo sapiens
  source 1..60: mol_type = genomic DNA
ggaggggcccccctgccctgtggggtcaacccttctggaaactgtgaagatctcactctg

SEQ ID NO: 558 - DNA, 60 bp, Homo sapiens
  source 1..60: mol_type = genomic DNA
cgccgcgccggttgccgggcaacgtcaacaaacgacgcggccgccgtctccgtgcgcccg

SEQ ID NO: 559 - DNA, 60 bp, Homo sapiens
  source 1..60: mol_type = genomic DNA
gccacttgtttggggtccacaccactttccttctcatgggcccctgatgttcccccgaga

SEQ ID NO: 560 - DNA, 60 bp, Homo sapiens
  source 1..60: mol_type = genomic DNA
cgggccggctagggtgggagctgaggcctccaggtaggggaaactgaggcatcatccagg

SEQ ID NO: 561 - DNA, 60 bp, Homo sapiens
  source 1..60: mol_type = genomic DNA
ttgaaaacttatatatacaaacctctgatgcaacataaatgcctctacctactccaagga

SEQ ID NO: 562 - DNA, 60 bp, Homo sapiens
  source 1..60: mol_type = genomic DNA
cctgtggtttagcccaggaatctcacacacccccggcttcgcaacatggtacagtccaca

SEQ ID NO: 563 - DNA, 60 bp, Homo sapiens
  source 1..60: mol_type = genomic DNA
taaagcacagaacgcggagggggcctggggctgacagcttcgggcagggggagtggcttg

SEQ ID NO: 564 - DNA, 60 bp, Homo sapiens
  source 1..60: mol_type = genomic DNA
gcaaggagcgagatctcgcattagaggagaagaaggcacaggtacctcccccagtccccg

SEQ ID NO: 565 - DNA, 60 bp, Homo sapiens
  source 1..60: mol_type = genomic DNA
ccccatacctaccagttctgttttcccactacccgatgaaagtgtaaccgccccccggcg

SEQ ID NO: 566 - DNA, 60 bp, Homo sapiens
  source 1..60: mol_type = genomic DNA
ggcagtggagtggtccttgggaacccacatgaacgtgtgtgtctcaggtcttcaaagtaa

SEQ ID NO: 567 - DNA, 60 bp, Homo sapiens
  source 1..60: mol_type = genomic DNA
cctcagcctcactgccttccaatctcagctcaaagactgggcatcctgcctgggaccacg

SEQ ID NO: 568 - DNA, 60 bp, Homo sapiens
  source 1..60: mol_type = genomic DNA
ctcaggggcttcctatttcatcactaagaagagaaaacaggaagaagtctttgccaaagt

SEQ ID NO: 569 - DNA, 60 bp, Homo sapiens
  source 1..60: mol_type = genomic DNA
cagaggttgcgtgggggactcggggggtcagcctgaaaggaagggggccaagtacggaga

SEQ ID NO: 570 - DNA, 60 bp, Homo sapiens
  source 1..60: mol_type = genomic DNA
gaggggctgggaggtaccgcggccccctgcgggacgcacctgcgcaaagtgagggaccgg

SEQ ID NO: 571 - DNA, 60 bp, Homo sapiens
  source 1..60: mol_type = genomic DNA
aagaggccacctgggtccccacagccacctcacctcccgcggacgctgccccacgcagat

SEQ ID NO: 572 - DNA, 60 bp, Homo sapiens
  source 1..60: mol_type = genomic DNA
gcgtccctgtgtctttaacgcccccgttcctgcgtgtcccccccccgccccgttggtgcg

SEQ ID NO: 573 - DNA, 60 bp, Homo sapiens
  source 1..60: mol_type = genomic DNA
aaatcttccaaaagtttgcattgtttcaacttgtaatttcctcttgctccccctgcaccg

SEQ ID NO: 574 - DNA, 60 bp, Homo sapiens
  source 1..60: mol_type = genomic DNA
ggtccaacaccaatgtggcgtctgtctgcacctgcactggctaaggaagccccccccccg

SEQ ID NO: 575 - DNA, 60 bp, Homo sapiens
  source 1..60: mol_type = genomic DNA
ggcttactgacagaacaagagtgatccttgcctgctggcatccagatcacccccgccgcg

SEQ ID NO: 576 - DNA, 60 bp, Homo sapiens
  source 1..60: mol_type = genomic DNA
accacagtccagggtcttacacatcaccaagccccaccgcaggcagcttccacccccgag

SEQ ID NO: 577 - DNA, 60 bp, Homo sapiens
  source 1..60: mol_type = genomic DNA
ggttttgatatgggtttattaagcacaatttaggactgaaatagtctcctctggcctcca

SEQ ID NO: 578 - DNA, 60 bp, Homo sapiens
  source 1..60: mol_type = genomic DNA
tctctacccacttgtggcttttccattctatacattatctgctgactactttttatatca

SEQ ID NO: 579 - DNA, 60 bp, Homo sapiens
  source 1..60: mol_type = genomic DNA
gctttagaaggtatttacctgaaatctgacatccagcccccaccaaagccaccaaccgcg

SEQ ID NO: 580 - DNA, 60 bp, Homo sapiens
  source 1..60: mol_type = genomic DNA
ttagttttttatgccctcctttgaataaaagatattttgggcacaggttatcaacaccct

SEQ ID NO: 581 - DNA, 60 bp, Homo sapiens
  source 1..60: mol_type = genomic DNA
gtcctttctcaaatagagcactgccttttagctctgagctccctgatgggcttggctgta

SEQ ID NO: 582 - DNA, 60 bp, Homo sapiens
  source 1..60: mol_type = genomic DNA
tcctgggtggccgggtaagagggggtgagagctgctctctgaaggctgggacaggaagag

SEQ ID NO: 583 - DNA, 60 bp, Homo sapiens
  source 1..60: mol_type = genomic DNA
ggtcaatactaggagtcatgggcttcagaatttagaaactttggccgtgtggagttggga

SEQ ID NO: 584 - DNA, 60 bp, Homo sapiens
  source 1..60: mol_type = genomic DNA
gatattttagaaacgctattttgtttgaattcacaacagctgtgtaagtggcaccccccg

SEQ ID NO: 585 - DNA, 60 bp, Homo sapiens
  source 1..60: mol_type = genomic DNA
ggcccttcagccgcacatgagggcagggtgggtggccctgggaggccccaccacactgga

SEQ ID NO: 586 - DNA, 60 bp, Homo sapiens
  source 1..60: mol_type = genomic DNA
ccttagatctcagaaatttgatacatagattcaagttccaaatgaggatactccacggcg

SEQ ID NO: 587 - DNA, 60 bp, Homo sapiens
  source 1..60: mol_type = genomic DNA
cttaaatcttttcaatcaagctagagaaaacagccaaaggcaacaggataatggttgcca

SEQ ID NO: 588 - DNA, 60 bp, Homo sapiens
  source 1..60: mol_type = genomic DNA
tggcataatttaaaccgctatgcaaaaatgtggctacattctctctgatggcttttacct

SEQ ID NO: 589 - DNA, 60 bp, Homo sapiens
  source 1..60: mol_type = genomic DNA
accatgtccagaacacacatcaccccttatggcatctttgagcatcctgtcactctaaga

SEQ ID NO: 590 - DNA, 60 bp, Homo sapiens
  source 1..60: mol_type = genomic DNA
ttcagggtacttcactttctgaagatctgttgatatttttgcaattttacccccccaccg

SEQ ID NO: 591 - DNA, 60 bp, Homo sapiens
  source 1..60: mol_type = genomic DNA
cagatcatcttcttaattctgatgatttttgtcagacaaatagtataatcaccaagggtt

SEQ ID NO: 592 - DNA, 60 bp, Homo sapiens
  source 1..60: mol_type = genomic DNA
gcgcccggaataggtgaggcgggcccttaattgatcccggaccccgcccccttccggggg

SEQ ID NO: 593 - DNA, 60 bp, Homo sapiens
  source 1..60: mol_type = genomic DNA
ggggtctcagggctgaggacctgacctccgcccgctcctgcaatccctctccctggcctg

SEQ ID NO: 594 - DNA, 60 bp, Homo sapiens
  source 1..60: mol_type = genomic DNA
caccggcatcatctgtgggaacccaggctccttgtccctacacctgtgtggaaactgctg

SEQ ID NO: 595 - DNA, 60 bp, Homo sapiens
  source 1..60: mol_type = genomic DNA
atggctgtaagtggtgcttgtgcagctcccatgcagacttggccacctgctgggagcaga

SEQ ID NO: 596 - DNA, 60 bp, Homo sapiens
  source 1..60: mol_type = genomic DNA
ctctttacactctgtgtagttgctcaccacccacagggtcgggtttggagcctcctgtgg

SEQ ID NO: 597 - DNA, 60 bp, Homo sapiens
  source 1..60: mol_type = genomic DNA
cagccacacagccccacgcagccatccggccgtcgccgtgcgcacgtgcacggcgtgcgg

SEQ ID NO: 598 - DNA, 60 bp, Homo sapiens
  source 1..60: mol_type = genomic DNA
tcttgctgttcccaggcaccaccacagcaggtgctgccatactcttgtggtctctgtgcg

SEQ ID NO: 599 - DNA, 60 bp, Homo sapiens
  source 1..60: mol_type = genomic DNA
tgtgccctgggggtgaacctgagcatgggaatgcatgtggatggcacagagggggcacag

SEQ ID NO: 600 - DNA, 60 bp, Homo sapiens
  source 1..60: mol_type = genomic DNA
gctttggccgttcctggaggccttgggtggggctgggaaggccgggccctgtgggcagca

SEQ ID NO: 601 - DNA, 60 bp, Homo sapiens
  source 1..60: mol_type = genomic DNA
gaccccgggccctgctgggcctccctctcctctcgtggcaacacccccacgccccacgca

SEQ ID NO: 602 - DNA, 60 bp, Homo sapiens
  source 1..60: mol_type = genomic DNA
aagcccccttctcaaccagagagccagggcccaggcacgtgagggtgatgggaagacccg

SEQ ID NO: 603 - DNA, 60 bp, Homo sapiens
  source 1..60: mol_type = genomic DNA
tgctgcggggaagggaagtagggggcgttctaacccaggcaggctcagcagaagcactct

SEQ ID NO: 604 - DNA, 60 bp, Homo sapiens
  source 1..60: mol_type = genomic DNA
cctcgctgtcccgccccgcgcccacaggggccaatcagcgttcaggggcgttcttagccg

SEQ ID NO: 605 - DNA, 60 bp, Homo sapiens
  source 1..60: mol_type = genomic DNA
ttcccaacctgctttgcaaatgcgcaaaagccagatgccagcatctacagtcagcaaatg

SEQ ID NO: 606 - DNA, 60 bp, Homo sapiens
  source 1..60: mol_type = genomic DNA
actgctattcaaggcatcacagcctggccttctgctggtacatggggcagaagtgaaatg

SEQ ID NO: 607 - DNA, 60 bp, Homo sapiens
  source 1..60: mol_type = genomic DNA
aaaagggattcttatttttcacaaaatagttaaaatcctgcaggtactcccttctggcat

SEQ ID NO: 608 - DNA, 60 bp, Homo sapiens
  source 1..60: mol_type = genomic DNA
attttcccatgcccccggggagtctgcatttcccatgcccccaggagtctgcgtttcccg

SEQ ID NO: 609 - DNA, 60 bp, Homo sapiens
  source 1..60: mol_type = genomic DNA
acactgcactgttgtcttctctggaaattaagagaatgctgcaaaaacagaagctggaca

SEQ ID NO: 610 - DNA, 60 bp, Homo sapiens
  source 1..60: mol_type = genomic DNA
cttggccccggcccgcaacttcggactacacttcccagggggtagcgcgcggggcccccg

SEQ ID NO: 611 - DNA, 60 bp, Homo sapiens
  source 1..60: mol_type = genomic DNA
cctctgccagcctctcccctttggctgaacttccccgccctgggggggtctcagcaggag

SEQ ID NO: 612 - DNA, 60 bp, Homo sapiens
  source 1..60: mol_type = genomic DNA
tgctcgttgcctggcaggagccagatgtggtcaacctgcattcccctgggagcccactgt

SEQ ID NO: 613 - DNA, 60 bp, Homo sapiens
  source 1..60: mol_type = genomic DNA
ttttgatcttggttaaaattgcatcacataacctccaccctcaccatcacccgccccccg

SEQ ID NO: 614 - DNA, 60 bp, Homo sapiens
  source 1..60: mol_type = genomic DNA
agcaaatccatgaattttcagacactgttgctaagcgcagctttgctttcccctctgctt

SEQ ID NO: 615 - DNA, 60 bp, Homo sapiens
  source 1..60: mol_type = genomic DNA
cccacaatttccccctgggggcagctctgacacatttgctcaaatagtagccagaagccg

SEQ ID NO: 616 - DNA, 60 bp, Homo sapiens
  source 1..60: mol_type = genomic DNA
ggccgatcaacggtgacgcctgtcagtggccagactccgattggtcagcgggtagtcccg

SEQ ID NO: 617 - DNA, 60 bp, Homo sapiens
  source 1..60: mol_type = genomic DNA
cagaaagcctcagcaaaaactggtgggtccaaaactgtgtagtattttgttttctcttaa

SEQ ID NO: 618 - DNA, 60 bp, Homo sapiens
  source 1..60: mol_type = genomic DNA
ttgggcaataaactcttcttggtcttctgctttatccctgtcatctctccttgtcaccca

SEQ ID NO: 619 - DNA, 60 bp, Homo sapiens
  source 1..60: mol_type = genomic DNA
cattaccaccatctgtggttttcctttaagggtgagactatttatatgcaaattcaaaca

SEQ ID NO: 620 - DNA, 60 bp, Homo sapiens
  source 1..60: mol_type = genomic DNA
gacccagtcaaggttgagaggggcgtcgtgaagaggtgaggccatagcagcatccctgcg

SEQ ID NO: 621 - DNA, 60 bp, Homo sapiens
  source 1..60: mol_type = genomic DNA
agccagtgtggggccccacccagaacgaactgccctgtcttggcacccttcccagagaca

SEQ ID NO: 622 - DNA, 60 bp, Homo sapiens
  source 1..60: mol_type = genomic DNA
ctccccattacagtccctagtgacgcctgttacatctcccttccgcatagtatgtagtga

SEQ ID NO: 623 - DNA, 60 bp, Homo sapiens
  source 1..60: mol_type = genomic DNA
caggcggagaagctggaattcaggcaggaagttcaagctcacagtcctctgctaccatca

SEQ ID NO: 624 - DNA, 60 bp, Homo sapiens
  source 1..60: mol_type = genomic DNA
tttcagagtcagagtcagggtctttcagcaccaaatacaatgctattcttaactgatgga

SEQ ID NO: 625 - DNA, 60 bp, Homo sapiens
  source 1..60: mol_type = genomic DNA
tccaaaagaccaagtaccatttagcaaatcctgctacctaagttgtaatgatctcttcag

SEQ ID NO: 626 - DNA, 60 bp, Homo sapiens
  source 1..60: mol_type = genomic DNA
ctcgctgaagattttctcttccttccctcgcccaactctccctcggggcctctacggaga

SEQ ID NO: 627 - DNA, 60 bp, Homo sapiens
  source 1..60: mol_type = genomic DNA
cctcccctctgaggttggagggcattttctcccggtctcttcaacacttcatcacggaca

SEQ ID NO: 628 - DNA, 60 bp, Homo sapiens
  source 1..60: mol_type = genomic DNA
ggaggtatttttcagtttgactgctggtcatggatttcacctgagtttctcttaggacca

SEQ ID NO: 629 - DNA, 60 bp, Homo sapiens
  source 1..60: mol_type = genomic DNA
tcgcaaagcattagtaagggcaaatttgaagctgatatatcccaaaggaaaagattaacg

SEQ ID NO: 630 - DNA, 60 bp, Homo sapiens
  source 1..60: mol_type = genomic DNA
caaaaactgaagcggacggcagaagcacctagagagctggttagacctacgcctcgctga

SEQ ID NO: 631 - DNA, 60 bp, Homo sapiens
  source 1..60: mol_type = genomic DNA
gccctgcacctggctggcggcacctgtgggcactgaccactccacgccagctgttttcct

SEQ ID NO: 632 - DNA, 60 bp, Homo sapiens
  source 1..60: mol_type = genomic DNA
gactagaggagcagaaacgtgccccccccaacccgacgccggccttcaggtgagccagcg

SEQ ID NO: 633 - DNA, 60 bp, Homo sapiens
  source 1..60: mol_type = genomic DNA
gtgttggctctttcgtaagcggcgggcgaaggtcacaggccttgggccagtggtgggaca

SEQ ID NO: 634 - DNA, 60 bp, Homo sapiens
  source 1..60: mol_type = genomic DNA
aagggtttttgattggcagaaggcttgcacggccctacatgatcttttactgtcatgcat

SEQ ID NO: 635 - DNA, 60 bp, Homo sapiens
  source 1..60: mol_type = genomic DNA
gcaatccccgctccgactcgcgtgctctcgcctgctggtccccagtgggtgccccgagtc

SEQ ID NO: 636 - DNA, 60 bp, Homo sapiens
  source 1..60: mol_type = genomic DNA
gccccgcaaagctctgtggaaagcgccttacctgcttatctcccgccatctggaacatcc

SEQ ID NO: 637 - DNA, 60 bp, Homo sapiens
  source 1..60: mol_type = genomic DNA
agttccctgggggatggatgctgtgcttttgaggaataaaagaaaggtcagagaaggatc

SEQ ID NO: 638 - DNA, 60 bp, Homo sapiens
  source 1..60: mol_type = genomic DNA
gccccccgcttccatttgtgctgaatactagaaggtttttagagagagagaaagtttcag

SEQ ID NO: 639 - DNA, 60 bp, Homo sapiens
  source 1..60: mol_type = genomic DNA
gccccccgccaccactcatcagctgatcacatccacaattgtatagctcaccagtgctga

SEQ ID NO: 640 - DNA, 60 bp, Homo sapiens
  source 1..60: mol_type = genomic DNA
gccatcattaggagattattaaaatttggagtgtgttggctggcctcgccactccgcaag

SEQ ID NO: 641 - DNA, 60 bp, Homo sapiens
  source 1..60: mol_type = genomic DNA
gcccagtggtgagatagatcagacccgcttgctaaggtgctgtgtgggaaagctgttgta

SEQ ID NO: 642 - DNA, 60 bp, Homo sapiens
  source 1..60: mol_type = genomic DNA
gatatctgtttcctctggtttcagacagaggcgacttctgccaggaggcagcctgcgatt

SEQ ID NO: 643 - DNA, 60 bp, Homo sapiens
  source 1..60: mol_type = genomic DNA
gggagggggcagttctggggcagccacttggttctggtttcaggagattcgagtcccctc

SEQ ID NO: 644 - DNA, 60 bp, Homo sapiens
  source 1..60: mol_type = genomic DNA
gccccagcacttacccccgaattgtcttcagtgttatctgcctcttctgagaaggcaggg

SEQ ID NO: 645 - DNA, 60 bp, Homo sapiens
  source 1..60: mol_type = genomic DNA
ggaaagaacgcgtcctcgaggcggcgattgcaacactagcttcgctgcttaaaggggcag

SEQ ID NO: 646 - DNA, 60 bp, Homo sapiens
  source 1..60: mol_type = genomic DNA
tccccccgcggcggggctgtccccagggaccttctcagtgaatcctaggcggcagggacg

SEQ ID NO: 647 - DNA, 60 bp, Homo sapiens
  source 1..60: mol_type = genomic DNA
gtgcgctgcggcggagaccggtgcgcccctgcgcagtctcctcctccggaatggtccccc

SEQ ID NO: 648 - DNA, 60 bp, Homo sapiens
  source 1..60: mol_type = genomic DNA
gccgccactaacaaaccacagagatttttactgaaaataagttttcttcctctcttcttg

SEQ ID NO: 649 - DNA, 60 bp, Homo sapiens
  source 1..60: mol_type = genomic DNA
gccgcccccttccttcggagctacggacgaccagagaaatatttctggaagactatttac

SEQ ID NO: 650 - DNA, 60 bp, Homo sapiens
  source 1..60: mol_type = genomic DNA
accccgccccggacctggagccctctcagagcggtgcattctgggattcgcccgcgaaga

SEQ ID NO: 651 - DNA, 60 bp, Homo sapiens
  source 1..60: mol_type = genomic DNA
gcgctctgcacattcagggcattccccaaacccttcaggtcctgcccttcgccggattct

SEQ ID NO: 652 - DNA, 60 bp, Homo sapiens
  source 1..60: mol_type = genomic DNA
acattctcagcaagctggagagcaaattgcagttttaaatccaaaggcggagggaggggg

SEQ ID NO: 653 - DNA, 60 bp, Homo sapiens
  source 1..60: mol_type = genomic DNA
accatgtctcatgaccaaacatttgtcaaaagcaacactattggtacctgggcaggacga

SEQ ID NO: 654 - DNA, 60 bp, Homo sapiens
  source 1..60: mol_type = genomic DNA
aaccccctctgtaaccacgagatacagaaataaaaataatcactgctgagtttaggctgc

SEQ ID NO: 655 - DNA, 60 bp, Homo sapiens
  source 1..60: mol_type = genomic DNA
gcccacaaccccctaccaactccgccccccatttgtctgaagtgctgtcttttattcatt

SEQ ID NO: 656 - DNA, 60 bp, Homo sapiens
  source 1..60: mol_type = genomic DNA
gcccacaaggctccctgttctattccctggggttcagcagcccccctaaatggttcaggg

SEQ ID NO: 657 - DNA, 60 bp, Homo sapiens
  source 1..60: mol_type = genomic DNA
acccgatctttctctcacattaaacttgctccctcagggcaagaactgtcttgactcctt

SEQ ID NO: 658 - DNA, 60 bp, Homo sapiens
  source 1..60: mol_type = genomic DNA
atcgctgcctcgcaggaggcgaacgccgcgaccccagcggagcccgcggcccagccttga

SEQ ID NO: 659 - DNA, 60 bp, Homo sapiens
  source 1..60: mol_type = genomic DNA
gccccccgattgagtcactatgagggtgatgacaggctccaaggagaagagtccttgggc

SEQ ID NO: 660 - DNA, 60 bp, Homo sapiens
  source 1..60: mol_type = genomic DNA
acaggttttctgtgcttcctgctgtagcctgaaatgtaaactgttatacatggacagaaa

SEQ ID NO: 661 - DNA, 60 bp, Homo sapiens
  source 1..60: mol_type = genomic DNA
atctaaatatggcttctgaaacctatgcgtgttagttttaatgaaaaagcatatccagat

SEQ ID NO: 662 - DNA, 60 bp, Homo sapiens
  source 1..60: mol_type = genomic DNA
gctttttcccgcgttcccccccttttcctctcggttcccttccaatcagctccgggaggg

SEQ ID NO: 663 - DNA, 60 bp, Homo sapiens
  source 1..60: mol_type = genomic DNA
gccctttggaggaacaaagctttagcatttaaattgctgatcaagggcagattagtgaga

SEQ ID NO: 664 - DNA, 60 bp, Homo sapiens
  source 1..60: mol_type = genomic DNA
aattttcctatgtccccattcccagcctaaaacttgctgccttaaaacgtatcgccctgc

SEQ ID NO: 665 - DNA, 60 bp, Homo sapiens
  source 1..60: mol_type = genomic DNA
acacccattgccacttgttccattttctgttttatagtaggaactgcaagtaactccagt

SEQ ID NO: 666 - DNA, 60 bp, Homo sapiens
  source 1..60: mol_type = genomic DNA
aaatccttctcctattatattattttggtgctcacatacgcttctgaaattggatctgca

SEQ ID NO: 667 - DNA, 60 bp, Homo sapiens
  source 1..60: mol_type = genomic DNA
acccactcacagccttctgggaagtgtagtcttggagcggatgctattgcctaccgagct

SEQ ID NO: 668 - DNA, 60 bp, Homo sapiens
  source 1..60: mol_type = genomic DNA
accccattctaaagctgagtcagaggaagggctggggcttgtgctgggtcctacacggtg

SEQ ID NO: 669 - DNA, 60 bp, Homo sapiens
  source 1..60: mol_type = genomic DNA
gaatacaatttgagatgccaatccttgcaggacaggcacttgaggactcagaggctggtt

SEQ ID NO: 670 - DNA, 60 bp, Homo sapiens
  source 1..60: mol_type = genomic DNA
ataaagactatatttctcttaatagtgaaggagagaaagctcgcccagtgtcggtctaag

SEQ ID NO: 671 - DNA, 60 bp, Homo sapiens
  source 1..60: mol_type = genomic DNA
aacatacatggctggaactgaatagacttttactttcccgaggtgcttctacagttccct

SEQ ID NO: 672 - DNA, 60 bp, Homo sapiens
  source 1..60: mol_type = genomic DNA
gccgtgattattctccctggggtaagtcaacttagaatctcctctccgaacttttaagtg

SEQ ID NO: 673 - DNA, 60 bp, Homo sapiens
  source 1..60: mol_type = genomic DNA
acccaccaccaagaggatctttaaacttgatggaatgatgttatgattttatggtagccg

SEQ ID NO: 674 - DNA, 60 bp, Homo sapiens
  source 1..60: mol_type = genomic DNA
tccgccgcccccttgacgtcatgtcactcagaagtcaccctccttgttctcctctaagct

SEQ ID NO: 675 - DNA, 60 bp, Homo sapiens
  source 1..60: mol_type = genomic DNA
gatgcctggctgacttcagtgctgttgtgatacaggctcaaggactaagtgccctgagaa

SEQ ID NO: 676 - DNA, 60 bp, Homo sapiens
  source 1..60: mol_type = genomic DNA
acacccgccaccctctgccaaacctgttgcttcacttctctcttgaactacttgctcctt

SEQ ID NO: 677 - DNA, 60 bp, Homo sapiens
  source 1..60: mol_type = genomic DNA
gccccggctgatgcaacctcacgctgccgtgcggctctacctcgagtaaggaagccgaca

SEQ ID NO: 678 - DNA, 60 bp, Homo sapiens
  source 1..60: mol_type = genomic DNA
gtcttttcatggctcattcctccctgggaaaatagaagtcttaccatttccagggcctgt

SEQ ID NO: 679 - DNA, 60 bp, Homo sapiens
  source 1..60: mol_type = genomic DNA
acttccgcctccttgggaagggggcgtggcgggagaggaggaaagatactgggatcttcg

SEQ ID NO: 680 - DNA, 60 bp, Homo sapiens
  source 1..60: mol_type = genomic DNA
acccgggaaggatcggctcccacagtgccgtgtctcgaagcgagggatggagcgggacgg

SEQ ID NO: 681 - DNA, 60 bp, Homo sapiens
  source 1..60: mol_type = genomic DNA
accccgccaaacagatcaacactcaggtttgataagctgcaagttctggagttcctaagt

SEQ ID NO: 682 - DNA, 60 bp, Homo sapiens
  source 1..60: mol_type = genomic DNA
gccccttctgtgcctgttattaagtttgttgggggaaaaaatcgtagtttttgtggattt

SEQ ID NO: 683 - DNA, 60 bp, Homo sapiens
  source 1..60: mol_type = genomic DNA
gcccccattatccactccttctgctcttatctcagaaccacctgaggacacgtaactgct

SEQ ID NO: 684 - DNA, 60 bp, Homo sapiens
  source 1..60: mol_type = genomic DNA
acccccgccaccaaccaggtctaatgtcataaactctgcaggaatcctgtctgtggttct

SEQ ID NO: 685 - DNA, 60 bp, Homo sapiens
  source 1..60: mol_type = genomic DNA
aaccccaacacacacacgcagggctgtaaaccatatgattaggctcctgcctgactctcc

SEQ ID NO: 686 - DNA, 60 bp, Homo sapiens
  source 1..60: mol_type = genomic DNA
gccccgccggccaggactccaggccttcggtgttcagtcttgccatggcatcagtcattg

SEQ ID NO: 687 - DNA, 60 bp, Homo sapiens
  source 1..60: mol_type = genomic DNA
accaaaccatgccccgggtgacaggccccacccacagccgcccacccctcagcagcccct

SEQ ID NO: 688 - DNA, 60 bp, Homo sapiens
  source 1..60: mol_type = genomic DNA
agccaactgggcacagtgtcctgttgaatctccatccacagcctctgtctgttaagcatc

SEQ ID NO: 689 - DNA, 60 bp, Homo sapiens
  source 1..60: mol_type = genomic DNA
acctttagaaaggatagtgtgctacgtgcaaaagacgtggaggcaaattggggaagtatg

SEQ ID NO: 690 - DNA, 60 bp, Homo sapiens
  source 1..60: mol_type = genomic DNA
gcccccgcccccatatgctcctgctattattttggtaatgctctgatgcaacattgcaac

SEQ ID NO: 691 - DNA, 60 bp, Homo sapiens
  source 1..60: mol_type = genomic DNA
acttcttggcacaatcactttgaccctagccaagggcactgcttgtgcccggggtattac

SEQ ID NO: 692 - DNA, 60 bp, Homo sapiens
  source 1..60: mol_type = genomic DNA
gcaatcactgcattctctttgatgaccacctttcactaattttgacaaaataagaaataa

SEQ ID NO: 693 - DNA, 60 bp, Homo sapiens
  source 1..60: mol_type = genomic DNA
gccggcaactctcctccaataaccaaactcatttgtaagacccctcctaaaaagtgccat

SEQ ID NO: 694 - DNA, 60 bp, Homo sapiens
  source 1..60: mol_type = genomic DNA
tcctctaccgagttataatagaatcttcgaaggtagggcagggaacctgtatttaacaag

SEQ ID NO: 695 - DNA, 60 bp, Homo sapiens
  source 1..60: mol_type = genomic DNA
gctcctatgtaactgctcctatcagcaaattctgagaattctggggactctgataagtcc

SEQ ID NO: 696 - DNA, 60 bp, Homo sapiens
  source 1..60: mol_type = genomic DNA
ataccaagaagcaaagcgtgctcaagttgtctctacaacctaaaaaattattagattgtt

SEQ ID NO: 697 - DNA, 60 bp, Homo sapiens
  source 1..60: mol_type = genomic DNA
attagatttgaagtgaagactaataatgaacttgttacttggaaggaggtttggccgtat

SEQ ID NO: 698 - DNA, 60 bp, Homo sapiens
  source 1..60: mol_type = genomic DNA
gtgacagatgcgtacacacgttgtctgtcttcgcaataataaagtaatcattataatggg

SEQ ID NO: 699 - DNA, 60 bp, Homo sapiens
  source 1..60: mol_type = genomic DNA
gcaaaatgccttagctcaggtgatccctagacaacgtgtttttagatgagttatgacatt

SEQ ID NO: 700 - DNA, 60 bp, Homo sapiens
  source 1..60: mol_type = genomic DNA
gccccacagctgaagtagcctgtcacggtcacaagcaaatgacagcctgtcttccaagac

SEQ ID NO: 701 - DNA, 60 bp, Homo sapiens
  source 1..60: mol_type = genomic DNA
acccgaggcgagccagcagagccagggcccacccgctatttttagaaagctatcaggtgc

SEQ ID NO: 702 - DNA, 60 bp, Homo sapiens
  source 1..60: mol_type = genomic DNA
ttgcagggacgagagttaacaatcaccagcttttcttccggcccagcctgtgtgcttggt

SEQ ID NO: 703 - DNA, 60 bp, Homo sapiens
  source 1..60: mol_type = genomic DNA
acccctgccccgcgtcttctctctgggtggtggacagacaagaaaatctttgcacccact

SEQ ID NO: 704 - DNA, 60 bp, Homo sapiens
  source 1..60: mol_type = genomic DNA
gccacccccggagagctacagatgccacccacagctggctcctggaaacttgagcagaga

SEQ ID NO: 705 - DNA, 60 bp, Homo sapiens
  source 1..60: mol_type = genomic DNA
aacccatgtagagagaacgaacctgtctcccttcctgtacagagtacgggatccttcaac

SEQ ID NO: 706 - DNA, 60 bp, Homo sapiens
  source 1..60: mol_type = genomic DNA
aattatttcagttacacaagcataagtgggttgaataggataatagtcggtttttcactg

SEQ ID NO: 707 - DNA, 60 bp, Homo sapiens
  source 1..60: mol_type = genomic DNA
gccaaaatccggcataacacctatttattgcaaaaaggcataaaatcaaaatcctaaacc

SEQ ID NO: 708 - DNA, 60 bp, Homo sapiens
  source 1..60: mol_type = genomic DNA
aaccccatgaatctaccattgtacgtatgtggttggaaccatatggaggcagtaaactcg

SEQ ID NO: 709 - DNA, 60 bp, Homo sapiens
  source 1..60: mol_type = genomic DNA
acccacaggggctgtctgggtttctgtaccttggggactgtcctctgagttgccttccca

SEQ ID NO: 710 - DNA, 60 bp, Homo sapiens
  source 1..60: mol_type = genomic DNA
aaggctcgcctaaactttccccccttctcttgttcctcagcgactggtggttcccccctc

SEQ ID NO: 711 - DNA, 60 bp, Homo sapiens
  source 1..60: mol_type = genomic DNA
acacacaatccttacaagttctagccaatagctggctggctccaagcaataaaatactca

SEQ ID NO: 712 - DNA, 60 bp, Homo sapiens
  source 1..60: mol_type = genomic DNA
acccccaccccctcttatactgtctttggcatagcttagtcattaatagcagtcattagt

SEQ ID NO: 713 - DNA, 60 bp, Homo sapiens
  source 1..60: mol_type = genomic DNA
gctgtatgttccacccttctggagccatcttatttgcggcctggcctcctggcacaaggg

SEQ ID NO: 714 - DNA, 60 bp, Homo sapiens
  source 1..60: mol_type = genomic DNA
gcccatgtgcttggctgtgcgtgttcttagccccactcgacagccaaggctgggactaag

SEQ ID NO: 715 - DNA, 60 bp, Homo sapiens
  source 1..60: mol_type = genomic DNA
acccccgccccgaggtcttcttgacatctctgcttggtgacgtgcaggcttctcaatctc

SEQ ID NO: 716 - DNA, 60 bp, Homo sapiens
  source 1..60: mol_type = genomic DNA
atcaaggatacaattgtttctaagtttcagagttgaatgcttcattaaatgctggagcat

SEQ ID NO: 717 - DNA, 60 bp, Homo sapiens
  source 1..60: mol_type = genomic DNA
gccaccaacaactcaccggggtagccagaaaagcagagcagaaggtgggcggcggcagaa

SEQ ID NO: 718 - DNA, 60 bp, Homo sapiens
  source 1..60: mol_type = genomic DNA
aatatttgctctcatttttatggttcgtttattcattaagttgtaatataagagttgatt

SEQ ID NO: 719 - DNA, 60 bp, Homo sapiens
  source 1..60: mol_type = genomic DNA
gcctccctcgtcactcttcttatccctgccctccggattcacgccccggggaagcacgga

SEQ ID NO: 720 - DNA, 60 bp, Homo sapiens
  source 1..60: mol_type = genomic DNA
actgcactgagacactcaatatactttgttgattgattgataatttgtactaagtggctt

SEQ ID NO: 721 - DNA, 60 bp, Homo sapiens
  source 1..60: mol_type = genomic DNA
gcccctcagaggcagcttccatttgactgtcaagtagcaaataaatgtttaaacacacat

SEQ ID NO: 722 - DNA, 60 bp, Homo sapiens
  source 1..60: mol_type = genomic DNA
accccccattccactttgtattctggagggtaattggctacttctgctcctggtgttgct

SEQ ID NO: 723 - DNA, 60 bp, Homo sapiens
  source 1..60: mol_type = genomic DNA
gccacaaccccgaccctggccaaagtggcggggagcgggaaactaaaggaaagaacatgt

SEQ ID NO: 724 - DNA, 60 bp, Homo sapiens
  source 1..60: mol_type = genomic DNA
actcagtttaaatggggacaactgatgtctagggacacttccagaggtctcaggctataa

SEQ ID NO: 725 - DNA, 60 bp, Homo sapiens
  source 1..60: mol_type = genomic DNA
accaacatcccttcctgttcagtttccctctctggcccagcgcgaagggcgaggggcgac

SEQ ID NO: 726 - DNA, 60 bp, Homo sapiens
  source 1..60: mol_type = genomic DNA
gcccggcccctgctcctctcgctgttgcacgggctttggatctagtcatgggctggcagg

SEQ ID NO: 727 - DNA, 60 bp, Homo sapiens
  source 1..60: mol_type = genomic DNA
tttggggaacgctaactttgtgtgagtctgatttacctcagaaataacgtttaacgcact

SEQ ID NO: 728 - DNA, 60 bp, Homo sapiens
  source 1..60: mol_type = genomic DNA
acatacacacccccaacctcaaaggatatagaaactagcagaaggatatgcttatgtgct

SEQ ID NO: 729 - DNA, 60 bp, Homo sapiens
  source 1..60: mol_type = genomic DNA
gccgccggtgaccttcttccctgaggaccacggaacctgtgccatgggactgactgccca

SEQ ID NO: 730 - DNA, 60 bp, Homo sapiens
  source 1..60: mol_type = genomic DNA
acacccaccttggggggtcacggattgctccctgtggccctggcttcagcccacctgctc

SEQ ID NO: 731 - DNA, 60 bp, Homo sapiens
  source 1..60: mol_type = genomic DNA
aaggtctgggagccctctttgaggctgctgtggggacgtcctatctgctctccctgacca

SEQ ID NO: 732 - DNA, 60 bp, Homo sapiens
  source 1..60: mol_type = genomic DNA
gccaaccgtttgccctgtgccaggctgcagctttccttaagtcctgctgacaaggaaaat

SEQ ID NO: 733 - DNA, 60 bp, Homo sapiens
  source 1..60: mol_type = genomic DNA
gcccccgggcgcccaggttcactccccaaaccgcccctttgcaagagctccctctgctgt

SEQ ID NO: 734 - DNA, 60 bp, Homo sapiens
  source 1..60: mol_type = genomic DNA
agtagaagcgattagaagtggaggttagacaagagacaggcacacatatggaaagcaggc

SEQ ID NO: 735 - DNA, 60 bp, Homo sapiens
  source 1..60: mol_type = genomic DNA
ttttttttttaactactagtaattacagagaccaaatccacaattctcaactggtgggaa

SEQ ID NO: 736 - DNA, 60 bp, Homo sapiens
  source 1..60: mol_type = genomic DNA
aacccccattctcaaccaacatgctccagctagggctccatttacgttccaggatagagc

SEQ ID NO: 737 - DNA, 60 bp, Homo sapiens
  source 1..60: mol_type = genomic DNA
agctcctacaagaccctgggtggaagtggagcggagaagctcctaggatatagggaagag

SEQ ID NO: 738 - DNA, 60 bp, Homo sapiens
  source 1..60: mol_type = genomic DNA
gctccccaggcaactcgcggcgggcgaatcggcggctttcgcggcctcgctacgtccgta

SEQ ID NO: 739 - DNA, 60 bp, Homo sapiens
  source 1..60: mol_type = genomic DNA
gcccaccacaaacctctcctaccttgttcacaggtatgaatgcatggtatttcccctttg

SEQ ID NO: 740 - DNA, 60 bp, Homo sapiens
  source 1..60: mol_type = genomic DNA
tccgcttaatatacctagtgggtactatacatctccaactgaacaactcatagccacctc

SEQ ID NO: 741 - DNA, 60 bp, Homo sapiens
  source 1..60: mol_type = genomic DNA
ttcccgtccccctgccttgtccctcacactgtctctttaaagggctggcggcgccgcgga

SEQ ID NO: 742 - DNA, 60 bp, Homo sapiens
  source 1..60: mol_type = genomic DNA
gccccagtctgtaagccgccccaatcctctcagatccgagcaaagcctggaatcccccaa

SEQ ID NO: 743 - DNA, 60 bp, Homo sapiens
  source 1..60: mol_type = genomic DNA
gccccttagcaacgtggccaagtgccacatccaaaggaaccaagagagaagaggagaagt

SEQ ID NO: 744 - DNA, 60 bp, Homo sapiens
  source 1..60: mol_type = genomic DNA
gccaattattacacactttcaccaaatgttagagggagaaatgactccattgtggaaatc

SEQ ID NO: 745 - DNA, 60 bp, Homo sapiens
  source 1..60: mol_type = genomic DNA
gcccccaccccgtttcttagtctcttttggatcagcaccatttcactttaccccagtgct

SEQ ID NO: 746 - DNA, 60 bp, Homo sapiens
  source 1..60: mol_type = genomic DNA
gccgcccactgcaggttgaggccgatgctgggctcagccaatcctgttataagcattaga

SEQ ID NO: 747 - DNA, 60 bp, Homo sapiens
  source 1..60: mol_type = genomic DNA
accccccaacacatcccattctgccacctggagtatttccttcctgaattatccttaacg

SEQ ID NO: 748 - DNA, 60 bp, Homo sapiens
  source 1..60: mol_type = genomic DNA
gcccccatgatttcattgaccaaccatggttgctgtacttccttgatcttgggttcttcc

SEQ ID NO: 749 - DNA, 60 bp, Homo sapiens
  source 1..60: mol_type = genomic DNA
gccgcttacagatatagcatatggagtcctaattgattggaggcctcactgaatttgcac

SEQ ID NO: 750 - DNA, 60 bp, Homo sapiens
  source 1..60: mol_type = genomic DNA
accccacagccttcctagcacagggactgaagatggggtaggtatcatctttatccttca

SEQ ID NO: 751 - DNA, 60 bp, Homo sapiens
  source 1..60: mol_type = genomic DNA
acccgccccacatatcagggaacaatttaaaatcctggcacaataatgagaagggagagt

SEQ ID NO: 752 - DNA, 60 bp, Homo sapiens
  source 1..60: mol_type = genomic DNA
attctggcaggacacaggcatcaccttgagggatggggacaggtttccagacctctggct

SEQ ID NO: 753 - DNA, 60 bp, Homo sapiens
  source 1..60: mol_type = genomic DNA
gacccccccgcaggtagcagaggatcaggactggcgaagcataggctctgggctggagct

SEQ ID NO: 754 - DNA, 60 bp, Homo sapiens
  source 1..60: mol_type = genomic DNA
attaggctgttaacctcctttcgggaaagattatttataacttgtctgtgtacccccagt

SEQ ID NO: 755 - DNA, 60 bp, Homo sapiens
  source 1..60: mol_type = genomic DNA
ggctccagggacctgcccacaccctctggtgatcatgctgagcaggcatcttagacaaag

SEQ ID NO: 756 - DNA, 60 bp, Homo sapiens
  source 1..60: mol_type = genomic DNA
atctgtgtccacagcccttgctcccttgagctccttctacctaccaccagaattatccat

SEQ ID NO: 757 - DNA, 60 bp, Homo sapiens
  source 1..60: mol_type = genomic DNA
tctgagccctttgtttaaagttagctcatccgaggcggcccctttgggaccataagtttg

SEQ ID NO: 758 - DNA, 60 bp, Homo sapiens
  source 1..60: mol_type = genomic DNA
agcaacccacggccggcgctttgaggacttgaacccggcccagaccccggggcccaggcc

SEQ ID NO: 759 - DNA, 60 bp, Homo sapiens
  source 1..60: mol_type = genomic DNA
gcctccccatcacagaggatcaactccaggtggtccagcttccctgacatccaggaggaa

SEQ ID NO: 760 - DNA, 60 bp, Homo sapiens
  source 1..60: mol_type = genomic DNA
gcccccacagtcttataacattttgcaaaagtggaactatttaggacaaggtttgccaaa

SEQ ID NO: 761 - DNA, 60 bp, Homo sapiens
  source 1..60: mol_type = genomic DNA
gcccagcttataaaaactactgttgggcaactcattctccttgctatcactcacaaataa

SEQ ID NO: 762 - DNA, 60 bp, Homo sapiens
  source 1..60: mol_type = genomic DNA
gcccccaacacaccaagaaaccgaaacgcctcgcccgggagaagcagcgtagcctggacc

SEQ ID NO: 763 - DNA, 60 bp, Homo sapiens
  source 1..60: mol_type = genomic DNA
aaccacccccttgagaaaaaacgggcttggaacgtcggagacttgcccaacgtcccacac

SEQ ID NO: 764 - DNA, 60 bp, Homo sapiens
  source 1..60: mol_type = genomic DNA
aactagtctagccttaagcagctcctccaagcccctctcaaaggcccaggagcccggcag

SEQ ID NO: 765 - DNA, 60 bp, Homo sapiens
  source 1..60: mol_type = genomic DNA
gcgcccccgacgcgccccgaccttcttgccgtcccgcagcttgacctggccctccaccag

SEQ ID NO: 766 - DNA, 60 bp, Homo sapiens
  source 1..60: mol_type = genomic DNA
gcggcggagtccaggccttgctgcgctcctcaactgcgaccgccgcaagttccacactag

SEQ ID NO: 767 - DNA, 60 bp, Homo sapiens
  source 1..60: mol_type = genomic DNA
acatctgagtatggggacatccgcttctggccgaaagtgtgatacaccaaaaatgatcac

SEQ ID NO: 768 - DNA, 60 bp, Homo sapiens
  source 1..60: mol_type = genomic DNA
actctcgcccccgctcccagtatgggcactgttgacactgacacccttttcaagacgttt

SEQ ID NO: 769 - DNA, 60 bp, Homo sapiens
  source 1..60: mol_type = genomic DNA
gcaaattattcagggaattacattagcaaaagtgccttcagttggactaaaagagcttga

SEQ ID NO: 770 - DNA, 60 bp, Homo sapiens
  source 1..60: mol_type = genomic DNA
ggcttctcagacccgaggctgcatttatctactcaacctgagaggaaagggttcagaagg

SEQ ID NO: 771 - DNA, 60 bp, Homo sapiens
  source 1..60: mol_type = genomic DNA
gcccaccccccagtcagagggcacagtgggtgagaaaattcagggtgggaaaggaaacac

SEQ ID NO: 772 - DNA, 60 bp, Homo sapiens
  source 1..60: mol_type = genomic DNA
agttaggactgattaatcctttcttgccctcattgtacacttgacactataggatatttg

SEQ ID NO: 773 - DNA, 60 bp, Homo sapiens
  source 1..60: mol_type = genomic DNA
gccgccgcggactccaccgcgggttttcctctccgtcgggaagagaccgacctgggaggg

SEQ ID NO: 774 - DNA, 60 bp, Homo sapiens
  source 1..60: mol_type = genomic DNA
gacctcatttgccctgaggccctcccaagcaccagagctggaccactgttcactatttat

SEQ ID NO: 775 - DNA, 60 bp, Homo sapiens
  source 1..60: mol_type = genomic DNA
acacacattgcactcgggacccagttgcatacagcccttacagcttcacagaaggaagat

SEQ ID NO: 776 - DNA, 60 bp, Homo sapiens
  source 1..60: mol_type = genomic DNA
agccactgagtaccaagaaactcaagttctaatatcatttatgcctatttaaaatatata

SEQ ID NO: 777 - DNA, 60 bp, Homo sapiens
  source 1..60: mol_type = genomic DNA
agcgtctcctgcacccgggagacccgagaactcagcgatcagctggctgcccgcgattca

SEQ ID NO: 778 - DNA, 60 bp, Homo sapiens
  source 1..60: mol_type = genomic DNA
acagccctcggcccctaaccccctctttccggattaaagtgtaagaatacaaatgtaata

SEQ ID NO: 779 - DNA, 60 bp, Homo sapiens
  source 1..60: mol_type = genomic DNA
ttttttttggttcctcagtgactctccttcttctcattaattaatcaatttgcttcaaca

SEQ ID NO: 780 - DNA, 60 bp, Homo sapiens
  source 1..60: mol_type = genomic DNA
atttagcaatctccagttacttctttagctttatgaatggaagttgatgaattaggaatt

SEQ ID NO: 781 - DNA, 60 bp, Homo sapiens
  source 1..60: mol_type = genomic DNA
gccgccatgaggctaaccagactcttctctcagatatgaaatgaggatagtgagagatag

SEQ ID NO: 782 - DNA, 60 bp, Homo sapiens
  source 1..60: mol_type = genomic DNA
gcccccccgttttccattcaaaggggagcaagctgtccttctaagggaagaagccagcag

SEQ ID NO: 783 - DNA, 60 bp, Homo sapiens
  source 1..60: mol_type = genomic DNA
gcaccgcgccgcccgggtgctgggtgggccaggcgacgggaatcctggagcgtgccgggg

SEQ ID NO: 784 - DNA, 60 bp, Homo sapiens
  source 1..60: mol_type = genomic DNA
gccctacacacacaccctcgcgccggctgaaagcatggaggattcagggcatttgaaaaa

SEQ ID NO: 785 - DNA, 60 bp, Homo sapiens
  source 1..60: mol_type = genomic DNA
gcccacaaaaggacataccaaaataaagaggacttttatcacctggcaaaggcggcaggg

SEQ ID NO: 786 - DNA, 60 bp, Homo sapiens
  source 1..60: mol_type = genomic DNA
aggattcttccccccatatttatcttttacacacactccaggcaagccagaggggcttct

SEQ ID NO: 787 - DNA, 60 bp, Homo sapiens
  source 1..60: mol_type = genomic DNA
accccacaaccccacctgcaaacttcttatgcgaaagagaaggtcttgcaacactctctt

SEQ ID NO: 788 - DNA, 60 bp, Homo sapiens
  source 1..60: mol_type = genomic DNA
accccccggagttgtgcaacacagcttgtagtgacagaagcctttagagtactaacaatt

SEQ ID NO: 789 - DNA, 60 bp, Homo sapiens
  source 1..60: mol_type = genomic DNA
gccaagttttaattatcttatggttatgaggaggtagccaatcctggaagaggacctcgg

SEQ ID NO: 790 - DNA, 60 bp, Homo sapiens
  source 1..60: mol_type = genomic DNA
ggctctgttcctgcccccacagggctgcagtgtcgcccactgggcctgatggcagcgact

SEQ ID NO: 791 - DNA, 60 bp, Homo sapiens
  source 1..60: mol_type = genomic DNA
gcccccgcccaggaggatctttttattctaagctttgattttcttaggctactgtagaat

SEQ ID NO: 792 - DNA, 60 bp, Homo sapiens
  source 1..60: mol_type = genomic DNA
aagaaaagccaagctccagctgtagagctggcaccgttcatgctttactctccctactca

SEQ ID NO: 793 - DNA, 60 bp, Homo sapiens
  source 1..60: mol_type = genomic DNA
ggggtgtgccctccagtgtgcagaagctggaggccataatgccacgctccgggatccctt

SEQ ID NO: 794 - DNA, 60 bp, Homo sapiens
  source 1..60: mol_type = genomic DNA
gcccccagcgtctgcagtggaaaccgagtccctggggagaggagaaaagcttcctggaag

SEQ ID NO: 795 - DNA, 60 bp, Homo sapiens
  source 1..60: mol_type = genomic DNA
agtcctcatcccctacaggacaccaaggtccattccgccagagctcaggggacacaacaa

SEQ ID NO: 796 - DNA, 60 bp, Homo sapiens
  source 1..60: mol_type = genomic DNA
gcccccaaggaactgtgtgagatgaacacttgctctttccagcttcacagtgttgggttg

SEQ ID NO: 797 - DNA, 60 bp, Homo sapiens
  source 1..60: mol_type = genomic DNA
gccccgccccccggtactaggagtgaccatttaggccatagccacatttttaatgcttaa

SEQ ID NO: 798 - DNA, 60 bp, Homo sapiens
  source 1..60: mol_type = genomic DNA
ggggtcatttcactaattaatagcagattctagtacaggggtcacgaggcgggtacagag

SEQ ID NO: 799 - DNA, 60 bp, Homo sapiens
  source 1..60: mol_type = genomic DNA
ttgaagtctctcttccctggttccagtgcacactgggctccagaccataagagaaatacc

SEQ ID NO: 800 - DNA, 60 bp, Homo sapiens
  source 1..60: mol_type = genomic DNA
aaaaaaagccctggattctaaatactcccagtcattacgcttaggaagagaaaaataaaa

SEQ ID NO: 801 - DNA, 60 bp, Homo sapiens
  source 1..60: mol_type = genomic DNA
acacaaacaagacaggagaaagtaatcaataatgctgtactgagaatttggttctgtgga

SEQ ID NO: 802 - DNA, 60 bp, Homo sapiens
  source 1..60: mol_type = genomic DNA
gagatttgataatattgacttccctactaacagactcagtcgcatagcagtctttctgat

SEQ ID NO: 803 - DNA, 60 bp, Homo sapiens
  source 1..60: mol_type = genomic DNA
ttttttcttgcagaagttaagaagtctgcttaactcgcaggtcaccaagagattgattaa

SEQ ID NO: 804 - DNA, 60 bp, Homo sapiens
  source 1..60: mol_type = genomic DNA
atgctctgggaaagcaggaattgtgttggatttgctgtccatttcacccatgcctagcat

SEQ ID NO: 805 - DNA, 60 bp, Homo sapiens
  source 1..60: mol_type = genomic DNA
aaagctccagctggtcaggaaacattgtctttacaatcaagataaacatctggctcaggg

SEQ ID NO: 806 - DNA, 60 bp, Homo sapiens
  source 1..60: mol_type = genomic DNA
gacttagtgaaatgtcgtaccaaagatcccaaactaacattttgctctcaagccctgatc

SEQ ID NO: 807 - DNA, 60 bp, Homo sapiens
  source 1..60: mol_type = genomic DNA
gcccccgcccagcacacacagtatttcccattatctggaacttcataggctatggcttta

SEQ ID NO: 808 - DNA, 60 bp, Homo sapiens
  source 1..60: mol_type = genomic DNA
tcagccgctgtgcccctttgcgggtcagtgtgttgtttgacctcggccgcgggtgccccc

SEQ ID NO: 809 - DNA, 60 bp, Homo sapiens
  source 1..60: mol_type = genomic DNA
attctccgtctgtctccgagcacaggggccccacgcacctctgggggatccatcctgggg

SEQ ID NO: 810 - DNA, 60 bp, Homo sapiens
  source 1..60: mol_type = genomic DNA
acaacccctacctgctgatcccagtgttctttgctcaggtcagcccttttcctgatttct

SEQ ID NO: 811 - DNA, 60 bp, Homo sapiens
  source 1..60: mol_type = genomic DNA
gcaggtcaaatggaggatggactccaatggaaagtgaatccccaacagaggacacttcct

SEQ ID NO: 812 - DNA, 60 bp, Homo sapiens
  source 1..60: mol_type = genomic DNA
ggtctcctggcctgttgttcactgcattctatcactcagggccgtgcagggcccatggtc

SEQ ID NO: 813 - DNA, 60 bp, Homo sapiens
  source 1..60: mol_type = genomic DNA
ggctggcagagacaaagcagtccaaaggcagggcacaaaagcaaatgaggcagtggtgat

SEQ ID NO: 814 - DNA, 60 bp, Homo sapiens
  source 1..60: mol_type = genomic DNA
acccccagcactctccttagattcaggtaaaagcatgttataaccgtctataggacaaac

SEQ ID NO: 815 - DNA, 60 bp, Homo sapiens
  source 1..60: mol_type = genomic DNA
aaagtaggtgatgggggctcaagcctatttattttgccattaagtgtggttgcagaagac

SEQ ID NO: 816 - DNA, 60 bp, Homo sapiens
  source 1..60: mol_type = genomic DNA
agcacacccagtgcccatcctttaccctccagatgatcacttggggtccaagtgttacct

SEQ ID NO: 817 - DNA, 60 bp, Homo sapiens
  source 1..60: mol_type = genomic DNA
gccccaggtgggcggggcaggtgctggtgggttaaaagctggtagctgggggcttttcag

SEQ ID NO: 818 - DNA, 60 bp, Homo sapiens
  source 1..60: mol_type = genomic DNA
gcccccatagattgtcagctgtaagtgaaactcctagtgaaaaagaggggagccctgtgt

SEQ ID NO: 819 - DNA, 60 bp, Homo sapiens
  source 1..60: mol_type = genomic DNA
ttaccatagcagacgatggcagccttggcaccccgatagtagattctactcatggcctca

SEQ ID NO: 820 - DNA, 60 bp, Homo sapiens
  source 1..60: mol_type = genomic DNA
gccccccgtctgcacctgctttcctcatctttggaatgggtgtgaccgtaatcaccttcc

SEQ ID NO: 821 - DNA, 60 bp, Homo sapiens
  source 1..60: mol_type = genomic DNA
gcccacccggtcccggggcctctaggccgggagggtgtttacgttctctacgggctcggg

SEQ ID NO: 822 - DNA, 60 bp, Homo sapiens
  source 1..60: mol_type = genomic DNA
acagtggccatacgggcacaggagaccttttatgggactttggccctggcaggacccagg

SEQ ID NO: 823 - DNA, 60 bp, Homo sapiens
  source 1..60: mol_type = genomic DNA
gccctggttatttggccgccttcgccggcagctcagggcagagtctcctggaaggcgcag

SEQ ID NO: 824 - DNA, 60 bp, Homo sapiens
  source 1..60: mol_type = genomic DNA
gcccactgtcttggcatcttccctgcatctttatagtgaaggcatgacctatgtggtggg

SEQ ID NO: 825 - DNA, 60 bp, Homo sapiens
  source 1..60: mol_type = genomic DNA
gctaaaaatgactccccaaggaactccagcagagtgtggtattgtctcaagataaaaaca

SEQ ID NO: 826 - DNA, 60 bp, Homo sapiens
  source 1..60: mol_type = genomic DNA
gcccccgtagttctaaagaagaatgtccaaagaatactacagtagaattaagcgtttgag

SEQ ID NO: 827 - DNA, 60 bp, Homo sapiens
  source 1..60: mol_type = genomic DNA
gccccttccaccccagccccaaagggcagaagaaacgcctgactttaggtttctctattg

SEQ ID NO: 828 - DNA, 60 bp, Homo sapiens
  source 1..60: mol_type = genomic DNA
gccaccaccccccgcaggcggtttctgggtgaagcagatgttttctttaaaatttgtcat

SEQ ID NO: 829 - DNA, 60 bp, Homo sapiens
  source 1..60: mol_type = genomic DNA
gccctccgtgctgggcagtctttctgctgctttgcagcatcagatggcagcattatcatc

SEQ ID NO: 830 - DNA, 60 bp, Homo sapiens
  source 1..60: mol_type = genomic DNA
gcccacccactgtaacttggttagttaaacctgcactttttggtaaaatctggagaggtg

SEQ ID NO: 831 - DNA, 60 bp, Homo sapiens
  source 1..60: mol_type = genomic DNA
acccacacacgcatgcacagcagttgctttcaggagctataaacatctctggatgggctg

SEQ ID NO: 832 - DNA, 60 bp, Homo sapiens
  source 1..60: mol_type = genomic DNA
ttccttgtgccacagccaccaactctcttaagacagtagaggtccatcggcctcactcaa

SEQ ID NO: 833 - DNA, 60 bp, Homo sapiens
  source 1..60: mol_type = genomic DNA
acacacacattgagtgaataagcagggacagtgagtggtatggaaaagttagctggattc

SEQ ID NO: 834 - DNA, 60 bp, Homo sapiens
  source 1..60: mol_type = genomic DNA
accccggggcgtttaaggtgtgccttctccccatgacctcttctctggagctccctccag

SEQ ID NO: 835 - DNA, 60 bp, Homo sapiens
  source 1..60: mol_type = genomic DNA
gccctgaagttctgggtggaaggcgataccacccctgggataggggatactggaagtaca

SEQ ID NO: 836 - DNA, 60 bp, Homo sapiens
  source 1..60: mol_type = genomic DNA
ggccacccacttgccagtggcccaggtggcaggccagccacttgccaatccccttcctga

SEQ ID NO: 837 - DNA, 60 bp, Homo sapiens
  source 1..60: mol_type = genomic DNA
aacttattgcactatggcagcatctcatcttctgttaggtcctcacatgaattcattttg

SEQ ID NO: 838 - DNA, 60 bp, Homo sapiens
  source 1..60: mol_type = genomic DNA
aatgaattagtatttctctacttagtcatgtataagtgagttgagcctagagggacttgg

SEQ ID NO: 839 - DNA, 60 bp, Homo sapiens
  source 1..60: mol_type = genomic DNA
accacgacccccgtccccatccagcccttcctttaggaaagggaggagtacagtatatgg

SEQ ID NO: 840 - DNA, 60 bp, Homo sapiens
  source 1..60: mol_type = genomic DNA
aacaggaatctcttcacaccttctctttggagcccttaatgatacgacgaaccccaagtg

SEQ ID NO: 841 - DNA, 60 bp, Homo sapiens
  source 1..60: mol_type = genomic DNA
aggaagtgagtgagtttaatgtgaaagaacaagaattaatctcattaccctagtaacaga

SEQ ID NO: 842 - DNA, 60 bp, Homo sapiens
  source 1..60: mol_type = genomic DNA
gccccccgccaccgcagatgaaaacatcaactctgcagaattaatggatatgggaatcac

SEQ ID NO: 843 - DNA, 60 bp, Homo sapiens
  source 1..60: mol_type = genomic DNA
gttttttttgcatcctttcccttgttttactccacaaacccaagactttgcagtggttaa

SEQ ID NO: 844 - DNA, 60 bp, Homo sapiens
  source 1..60: mol_type = genomic DNA
acgcccgccccatgccctgtggctttgtactgtttcatttgaggttctgttcacttctct

SEQ ID NO: 845 - DNA, 60 bp, Homo sapiens
  source 1..60: mol_type = genomic DNA
aagtacctctttaattcactcttccataggtccccaactgaactgtcttctttagctccc

SEQ ID NO: 846 - DNA, 60 bp, Homo sapiens
  source 1..60: mol_type = genomic DNA
ttttctagttcttagttaatagcaccacaattcagtggtcacagcaagccattttccttc

SEQ ID NO: 847 - DNA, 60 bp, Homo sapiens
  source 1..60: mol_type = genomic DNA
acccccgaaaagtgaagttcaactccctaacagttctcgcttccccaaacaaaagggaaa

SEQ ID NO: 848 - DNA, 60 bp, Homo sapiens
  source 1..60: mol_type = genomic DNA
aattaatacagaattaattgggacatattgttaaagggctaaggcccctcagaatagatg

SEQ ID NO: 849 - DNA, 60 bp, Homo sapiens
  source 1..60: mol_type = genomic DNA
gccacttcccgcgccgcctatgagtcccctcgaaggctggtgccctcaccagcacctgct

SEQ ID NO: 850 - DNA, 60 bp, Homo sapiens
  source 1..60: mol_type = genomic DNA
gcacccagcagctgtaagtgtggttcctcccatggtgctgggctgggtggagccaagacg

SEQ ID NO: 851 - DNA, 60 bp, Homo sapiens
  source 1..60: mol_type = genomic DNA
acttttccaaacccatccaggaccagcgagattcaggcaagggattcccccccacaaacc

SEQ ID NO: 852 - DNA, 60 bp, Homo sapiens
  source 1..60: mol_type = genomic DNA
gccacctcccccagcatctcactctaaaggggaggcatcttgggtggagagtaccgggct

SEQ ID NO: 853 - DNA, 60 bp, Homo sapiens
  source 1..60: mol_type = genomic DNA
accttcaaggagcacagagtttgcaagggggctgacaggtgtcgccgggtggcgggaccg

SEQ ID NO: 854 - DNA, 60 bp, Homo sapiens
  source 1..60: mol_type = genomic DNA
gcccaccattagaacactccgtcaggttccacaaacccttcatgaaagcccttttcctcc

SEQ ID NO: 855 - DNA, 60 bp, Homo sapiens
  source 1..60: mol_type = genomic DNA
ggctccacagaggcgaggatgggaagaggcggaggaaccggctgtgcgggacacctgagc

SEQ ID NO: 856 - DNA, 60 bp, Homo sapiens
  source 1..60: mol_type = genomic DNA
gcccccccccgccccaatagttaagcccagttcatcagttaatctggaaagctcataaac

SEQ ID NO: 857 - DNA, 60 bp, Homo sapiens
  source 1..60: mol_type = genomic DNA
gacatccaattcctctgtaatctttatctagcttccagccttcatcaggcttttcactcc

SEQ ID NO: 858 - DNA, 60 bp, Homo sapiens
  source 1..60: mol_type = genomic DNA
gggatgacccctacactacctctaaattgcatacaagctccctgaggtctcagttgaact

SEQ ID NO: 859 - DNA, 60 bp, Homo sapiens
  source 1..60: mol_type = genomic DNA
accaccatattagcctcaggcagtgttacatagagaaaatattttaggaatgcccctttt

SEQ ID NO: 860 - DNA, 60 bp, Homo sapiens
  source 1..60: mol_type = genomic DNA
atattaactccaaggtccactctcagtccttgccttatttggcttttcagccacgcttgc

SEQ ID NO: 861 - DNA, 60 bp, Homo sapiens
  source 1..60: mol_type = genomic DNA
gccccacctttttctttagttagggacaaaaaacaaacttaattatgggatcagacattt

SEQ ID NO: 862 - DNA, 60 bp, Homo sapiens
  source 1..60: mol_type = genomic DNA
gccccgctgcatctgtgcataatggatttggggttctcattcaacaaacagcaccattca

SEQ ID NO: 863 - DNA, 60 bp, Homo sapiens
  source 1..60: mol_type = genomic DNA
accgccgttccgtcagaagtagttggcccctgaattggtctgggtaacaggattaccttc

SEQ ID NO: 864 - DNA, 60 bp, Homo sapiens
  source 1..60: mol_type = genomic DNA
aagttaaaataaggtacaaagttatgctggcgtttacctgtaagacttgtacttgtatta

SEQ ID NO: 865 - DNA, 60 bp, Homo sapiens
  source 1..60: mol_type = genomic DNA
atcagtgttgtcacagccttggatgcgacaccttcacttgggtggtggcctcaaggacag

SEQ ID NO: 866 - DNA, 60 bp, Homo sapiens
  source 1..60: mol_type = genomic DNA
aacccagggaccactcaggcgccggccgctggcgctgcctgctcttcgactgggcgagct

SEQ ID NO: 867 - DNA, 60 bp, Homo sapiens
  source 1..60: mol_type = genomic DNA
gccagccaatgagctcaaggcttgtggccctcctccagccttggtagagcagggactgcg

SEQ ID NO: 868 - DNA, 60 bp, Homo sapiens
  source 1..60: mol_type = genomic DNA
aaggcctgtgctaaaagtgcaagaacccataacacgcaagatgtttccaaaatatacccg

SEQ ID NO: 869 - DNA, 60 bp, Homo sapiens
  source 1..60: mol_type = genomic DNA
gcagtcttaagcttcttcaatgaacccagacgtctgttttttattagctttctggtgatt

SEQ ID NO: 870 - DNA, 60 bp, Homo sapiens
  source 1..60: mol_type = genomic DNA
acaaccttttgtacaatatataagaaatacggcctgaaacggcagggaccgagccagaac

SEQ ID NO: 871 - DNA, 60 bp, Homo sapiens
  source 1..60: mol_type = genomic DNA
acaaaaaagatacatgaaaagaatctggttacagataggaagagtctgaggtaatgtcca

SEQ ID NO: 872 - DNA, 60 bp, Homo sapiens
  source 1..60: mol_type = genomic DNA
atgcctccagcttccctgaagtttcgggagcccaaaccctgtggaccgcgttggcagcca

SEQ ID NO: 873 - DNA, 60 bp, Homo sapiens
  source 1..60: mol_type = genomic DNA
aaaaaaagggatgctttcgtctacttagttgtggagttcgtgtatatctcagattctaga

SEQ ID NO: 874 - DNA, 60 bp, Homo sapiens
  source 1..60: mol_type = genomic DNA
agctcaaccccaccaacccttaggaccccgccttgtcccctgccttcccgccccttccct

SEQ ID NO: 875 - DNA, 60 bp, Homo sapiens
  source 1..60: mol_type = genomic DNA
gccccacacagcctttcctgtgtgtgtggattggtgtgctgtagatctgaagctctcaga

SEQ ID NO: 876 - DNA, 60 bp, Homo sapiens
  source 1..60: mol_type = genomic DNA
aaatcttgaggaaccagttctggctcaaaggattcctcaaaggaggtgatgggtggagtg

SEQ ID NO: 877 - DNA, 60 bp, Homo sapiens
  source 1..60: mol_type = genomic DNA
gcccccattttccccaatccttatggtcacaagataactactgaaccgccaggcattgtg

SEQ ID NO: 878 - DNA, 60 bp, Homo sapiens
  source 1..60: mol_type = genomic DNA
acccaccctccctccacttcgtattatctgaatcctcctttacctggaaataaaacttta

SEQ ID NO: 879 - DNA, 60 bp, Homo sapiens
  source 1..60: mol_type = genomic DNA
gcccctgccccgtttgcattgtttgtgtgcggcatcttcagtataaaaggccagcgccca

SEQ ID NO: 880 - DNA, 60 bp, Homo sapiens
  source 1..60: mol_type = genomic DNA
gcccttttctttactaggtgacatttcatgcaaggcaggagaccatcccctttattttgg

SEQ ID NO: 881 - DNA, 60 bp, Homo sapiens
  source 1..60: mol_type = genomic DNA
atctgggaactgccagcagggatcccaggccctccccaagcccctgctcctcccctgtgc

SEQ ID NO: 882 - DNA, 60 bp, Homo sapiens
  source 1..60: mol_type = genomic DNA
tcccaggtgcatgtccccagccacacctggtggggcagctgacttgataaaaagtagctc

SEQ ID NO: 883 - DNA, 60 bp, Homo sapiens
  source 1..60: mol_type = genomic DNA
ggccccggccaggaactctttcacatcctaagaacaggcctcggtgattagaacaagagg

SEQ ID NO: 884 - DNA, 60 bp, Homo sapiens
  source 1..60: mol_type = genomic DNA
agaccatttggccccctccccgcaccagcagaggctccaaacaccagcctccctgacaag

SEQ ID NO: 885 - DNA, 60 bp, Homo sapiens
  source 1..60: mol_type = genomic DNA
acatgttgctgacagcaattggctaaggggccgcggctctccaaacaccctctcccgccc

SEQ ID NO: 886 - DNA, 60 bp, Homo sapiens
  source 1..60: mol_type = genomic DNA
aaaatttccatgtataatggtcatcactgttaattagacacaattaagatccttctataa

SEQ ID NO: 887 - DNA, 60 bp, Homo sapiens
  source 1..60: mol_type = genomic DNA
accatgtcaacccttcagaggggtgccgatggtagagaagccaagcttgctatttctggt

SEQ ID NO: 888 - DNA, 60 bp, Homo sapiens
  source 1..60: mol_type = genomic DNA
gaaaatgctgtataattatcagcaagatggcgagaaataaacaagggagatttcatagga

SEQ ID NO: 889 - DNA, 60 bp, Homo sapiens
  source 1..60: mol_type = genomic DNA
gcgagcgccgcaccccgcgcggggaccgggccccggattccggcgtctgcgcggggatcg

SEQ ID NO: 890 - DNA, 60 bp, Homo sapiens
  source 1..60: mol_type = genomic DNA
gccaccccaccaggtcagctcttcagggggaacaccctcagtgagcgctctcttctgggg

SEQ ID NO: 891 - DNA, 60 bp, Homo sapiens
  source 1..60: mol_type = genomic DNA
gccccccaccaccctatcaccccacaacatacacagagctgacacttggtttagtttgtg

SEQ ID NO: 892 - DNA, 60 bp, Homo sapiens
  source 1..60: mol_type = genomic DNA
acaaaatacacaataccttctaagcatattatcatcagaagaacaagtttatcttcatgc

SEQ ID NO: 893 - DNA, 60 bp, Homo sapiens
  source 1..60: mol_type = genomic DNA
gccccttcaatctggaccacggcatagacttctgtcctgcttacacctgagtgttaatct

SEQ ID NO: 894 - DNA, 60 bp, Homo sapiens
  source 1..60: mol_type = genomic DNA
gccccgcacaccgccaggcctctggacgctgagactgggagcgaagtgggcaggagtcag

SEQ ID NO: 895 - DNA, 60 bp, Homo sapiens
  source 1..60: mol_type = genomic DNA
agtttcagatggcacaacctgacctctatttttatgccctttaaaacaaaaatcatgagc

SEQ ID NO: 896 - DNA, 60 bp, Homo sapiens
  source 1..60: mol_type = genomic DNA
gccgtattcctgcagcatcactccacaattctgctggtttccacagtgctagccatttac

SEQ ID NO: 897 - DNA, 60 bp, Homo sapiens
  source 1..60: mol_type = genomic DNA
aactcatctgctgtaacagctcctccccagccttacccgcaatgtcttcctggcttgcat

SEQ ID NO: 898 - DNA, 60 bp, Homo sapiens
  source 1..60: mol_type = genomic DNA
gcccccagcgagtggaaggtgtggctgcgcggcgctagggagcggtggtctgtggagctc

SEQ ID NO: 899 - DNA, 60 bp, Homo sapiens
  source 1..60: mol_type = genomic DNA
atcccactgaaacttgctgaaaaatctttccttcttttaccagttgtggacatcggatac

SEQ ID NO: 900 - DNA, 60 bp, Homo sapiens
  source 1..60: mol_type = genomic DNA
tccgcccaggtcctggagggtctgtcacatccgccacgtgaaagcacaacaggttgactg

SEQ ID NO: 901 - DNA, 60 bp, Homo sapiens
  source 1..60: mol_type = genomic DNA
aaaaaaagagagaacgttcatgagttatctaaagaacatctggtcgaaattgacctgaaa

SEQ ID NO: 902 - DNA, 60 bp, Homo sapiens
  source 1..60: mol_type = genomic DNA
aaaaaaaagagggcgagggagggctttgtgtcaaacctgtttgtgaaacaagaaggggac

SEQ ID NO: 903 - DNA, 60 bp, Homo sapiens
  source 1..60: mol_type = genomic DNA
ggcttatgtgactctacaggcctaatttacacccggctcttccagatttgaaggggttat

SEQ ID NO: 904 - DNA, 60 bp, Homo sapiens
  source 1..60: mol_type = genomic DNA
agcatgtgactcaacagtcacctctgtagagcatcactaaagatggcttctcccagggcc

SEQ ID NO: 905 - DNA, 60 bp, Homo sapiens
  source 1..60: mol_type = genomic DNA
gaaactgggcacatgggacacaaattactcagaaaaagtccatttttccttagtttctcc

SEQ ID NO: 906 - DNA, 60 bp, Homo sapiens
  source 1..60: mol_type = genomic DNA
gtcagtacgaacatttcctccattcatagagggcaataagcaagacctgtagacccaaag

SEQ ID NO: 907 - DNA, 60 bp, Homo sapiens
  source 1..60: mol_type = genomic DNA
atgggcttggcctatcacatgctggtgatcaattagcagcctgatctctgctttggcaaa

SEQ ID NO: 908 - DNA, 60 bp, Homo sapiens
  source 1..60: mol_type = genomic DNA
actgaaggggtgtgcccagcatggtcagacagtggacaggtgaggggtgcctgctcccca

SEQ ID NO: 909 - DNA, 60 bp, Homo sapiens
  source 1..60: mol_type = genomic DNA
aacactcaactggggcgaaatgaaacgcagggactgtgggaaggaactgcggtatgggct

SEQ ID NO: 910 - DNA, 60 bp, Homo sapiens
  source 1..60: mol_type = genomic DNA
acactgccagtgctcgagcccccagtggtccaccccaccctcatgaaagttgccctgcag

SEQ ID NO: 911 - DNA, 60 bp, Homo sapiens
  source 1..60: mol_type = genomic DNA
accaaagcttgtgttaagtctggtaaatttcttctagtaattgaattatttgttcacttc

SEQ ID NO: 912 - DNA, 60 bp, Homo sapiens
  source 1..60: mol_type = genomic DNA
ttaaatcacagcagatcttgttggacatttggggagaaaacaacttaaaattcacatcca

SEQ ID NO: 913 - DNA, 60 bp, Homo sapiens
  source 1..60: mol_type = genomic DNA
aacgcccacccacccccgcccgacctgccatgggtatttggaggtaagcaatagtcttac

SEQ ID NO: 914 - DNA, 60 bp, Homo sapiens
  source 1..60: mol_type = genomic DNA
acttaaataatatagtcatccccagaggtctctttttgtggctcaaatccttgacgtcaa

SEQ ID NO: 915 - DNA, 60 bp, Homo sapiens
  source 1..60: mol_type = genomic DNA
acctttccaggatgcaggactggagagaagaattggggacctaactggcttcccttgact

SEQ ID NO: 916 - DNA, 60 bp, Homo sapiens
  source 1..60: mol_type = genomic DNA
gccccgagaaatcttcagagagatgtttaaacaaatcaaaatatacttaaagtgtaaaaa

SEQ ID NO: 917 - DNA, 60 bp, Homo sapiens
  source 1..60: mol_type = genomic DNA
acacgaggactcctggtaaatttataccacttcttaccagtcaagggatctttgttctat

SEQ ID NO: 918 - DNA, 60 bp, Homo sapiens
  source 1..60: mol_type = genomic DNA
attaaggctctaacacaatgaaggctttaagtgaacatcatgtctggctgggcagatgca

SEQ ID NO: 919 - DNA, 60 bp, Homo sapiens
  source 1..60: mol_type = genomic DNA
tcttacgggcgcctcttctctttttgggaacgtggcgagcaaaaaatgcttgagccaggt

SEQ ID NO: 920 - DNA, 60 bp, Homo sapiens
  source 1..60: mol_type = genomic DNA
gccacttccaacagctcagtgattaccaaagatagtgcaggtaaatccgttaattgcttc

SEQ ID NO: 921 - DNA, 60 bp, Homo sapiens
  source 1..60: mol_type = genomic DNA
gctccattcgccactcttctctccctccacagatgagtttgctccacttgaggatacaga

SEQ ID NO: 922 - DNA, 60 bp, Homo sapiens
  source 1..60: mol_type = genomic DNA
ggcactggtcacagaatcatttatcctccttcagggctgaccaaacataaatcattctga

SEQ ID NO: 923 - DNA, 60 bp, Homo sapiens
  source 1..60: mol_type = genomic DNA
ttcttaaactgaaggacctttttctggctgtgaactaaaattacttttagggaaaaaaga

SEQ ID NO: 924 - DNA, 60 bp, Homo sapiens
  source 1..60: mol_type = genomic DNA
agctaaaatggacctgtagaggtgaattcatgttgacatatacgttcataacacttctgg

SEQ ID NO: 925 - DNA, 60 bp, Homo sapiens
  source 1..60: mol_type = genomic DNA
accccggaaagctgcgtccgggctggagccactggaacccgcgccaaggcccggaatcct

SEQ ID NO: 926 - DNA, 60 bp, Homo sapiens
  source 1..60: mol_type = genomic DNA
tccaggaagatatagaccctgcaaacttgttagcaggaccttgcggacaccaaggaggcg

SEQ ID NO: 927 - DNA, 60 bp, Homo sapiens
  source 1..60: mol_type = genomic DNA
acatctagttgcttttagctcttgtcaaatagttgtcataaagacaaggtttcacttacc

SEQ ID NO: 928 - DNA, 60 bp, Homo sapiens
  source 1..60: mol_type = genomic DNA
gccctgtacagtgaaggcaggacttcaccttgggaagaaacatctggaactctgacttag

SEQ ID NO: 929 - DNA, 60 bp, Homo sapiens
  source 1..60: mol_type = genomic DNA
gccccaggaggactgctgaaggcctggatgacaatgaacttagagtctggtccaaagggg

SEQ ID NO: 930 - DNA, 60 bp, Homo sapiens
  source 1..60: mol_type = genomic DNA
gccacgccttagagcagagcagcccctcctctcatttggtgcagaaacagtcaagaggaa

SEQ ID NO: 931 - DNA, 60 bp, Homo sapiens
  source 1..60: mol_type = genomic DNA
gccccaggtccagccccggaagcctgtcatctgcacggtgagctctgatgactgagtctc

SEQ ID NO: 932 - DNA, 60 bp, Homo sapiens
  source 1..60: mol_type = genomic DNA
aaccataaacccttgttccttcctgagaacagatgaaaacgcccgctccagtgacttttg

SEQ ID NO: 933 - DNA, 60 bp, Homo sapiens
  source 1..60: mol_type = genomic DNA
gacttcgatggggctctcagcatccacgggagtgacgtgggacatgcagaggtgcaagcc

SEQ ID NO: 934 - DNA, 60 bp, Homo sapiens
  source 1..60: mol_type = genomic DNA
gcacccaagtgtggcgcttcccaaacccctgcctagaaggccactagccctgcccgaggt

SEQ ID NO: 935 - DNA, 60 bp, Homo sapiens
  source 1..60: mol_type = genomic DNA
acggtgtcccacaggacccgcaaggtgaaagcaccagcctgtcaggaggaccctgggggg

SEQ ID NO: 936 - DNA, 60 bp, Homo sapiens
  source 1..60: mol_type = genomic DNA
accctttctggagaaatcagctggcgatcatctcctcgtggaaggctgccctgacttcca

SEQ ID NO: 937 - DNA, 60 bp, Homo sapiens
  source 1..60: mol_type = genomic DNA
accccgctctctgaagacctcgttcccaccggtctttcataaaggaatgatgaagaactc

SEQ ID NO: 938 - DNA, 60 bp, Homo sapiens
  source 1..60: mol_type = genomic DNA
gctccttacatctaagtgcaaactgggagtgcgtgggagcaaggacgaatgcacacctgt

SEQ ID NO: 939 - DNA, 60 bp, Homo sapiens
  source 1..60: mol_type = genomic DNA
gtcaaaagggggtgtcgaatttgaggggagtcccccactcccttgtccttagggtacgtc

SEQ ID NO: 940 - DNA, 60 bp, Homo sapiens
  source 1..60: mol_type = genomic DNA
gccacgtttctcctgagcccacttggtctcccgttattaggcggcccagttaagaggcat

SEQ ID NO: 941 - DNA, 60 bp, Homo sapiens
  source 1..60: mol_type = genomic DNA
gcaaattccccaggaattatcaaaatatgcaaagaaattcagtgaaggctaataaaggtg

SEQ ID NO: 942 - DNA, 60 bp, Homo sapiens
  source 1..60: mol_type = genomic DNA
gcaaagagtttgtgtactgctcattgatttaaaaaaaagacgtaaaatgtttctaaacta

SEQ ID NO: 943 - DNA, 60 bp, Homo sapiens
  source 1..60: mol_type = genomic DNA
gccttagtgaatcggtcacgtttaggaccctctaagtccatcctaattctgccagtagaa

SEQ ID NO: 944 - DNA, 60 bp, Homo sapiens
  source 1..60: mol_type = genomic DNA
gcccacagagggtcaggaatgtttgggatgtgcagccaagccacgttcttccccaggtgt

SEQ ID NO: 945 - DNA, 60 bp, Homo sapiens
  source 1..60: mol_type = genomic DNA
agaggcgccgagcagccgggagctccgtcctgcctgaggatgcggggcccaggctgcatc

SEQ ID NO: 946 - DNA, 60 bp, Homo sapiens
  source 1..60: mol_type = genomic DNA
ttatgaaagacaagatactcaagtgtccggcgcttacagggccatccatcttctttggcc

SEQ ID NO: 947 - DNA, 60 bp, Homo sapiens
  source 1..60: mol_type = genomic DNA
gttacagctgcggcatctatttggtttgggttgtaatccagctgttttgaagtggaacga

SEQ ID NO: 948 - DNA, 60 bp, Homo sapiens
  source 1..60: mol_type = genomic DNA
gagagcatccaactacgcgcccactttggctcacgtccactgccactctcacggaaactc

SEQ ID NO: 949 - DNA, 60 bp, Homo sapiens
  source 1..60: mol_type = genomic DNA
gcaactaatgtcctgtctccctgctctgtcatttggtccaagtcttcatctaacaccgtc

SEQ ID NO: 950 - DNA, 60 bp, Homo sapiens
  source 1..60: mol_type = genomic DNA
gccaagccccgtgacttctgctttaggggcagattgctggggagctagtctccttccccg

SEQ ID NO: 951 - DNA, 60 bp, Homo sapiens
  source 1..60: mol_type = genomic DNA
acctaatacaagagtgtgtctccatcacagctccacaagtgtgtttcggctgtagtgctt

SEQ ID NO: 952 - DNA, 60 bp, Homo sapiens
  source 1..60: mol_type = genomic DNA
aaagaaggaggccggcggggccaagcaacgccagcagctcgccccggacacgccgtcctg

SEQ ID NO: 953 - DNA, 60 bp, Homo sapiens
  source 1..60: mol_type = genomic DNA
gacccccgatgtttccccagcctctgagtgatgctcaacaggagtgtggctccgactggg

SEQ ID NO: 954 - DNA, 60 bp, Homo sapiens
  source 1..60: mol_type = genomic DNA
aaacaccatgctctctccttttggggtatttctcctccatcactgcatgccacctgggag

SEQ ID NO: 955 - DNA, 60 bp, Homo sapiens
  source 1..60: mol_type = genomic DNA
gtaccccccgagctggcccctggcagaaggagctggtttgttgttattatgcaagcggca

SEQ ID NO: 956 - DNA, 60 bp, Homo sapiens
  source 1..60: mol_type = genomic DNA
acaatcactcaggtgcttcacctagtgtaatcttcttatctacaagtgccttcctgaggc

SEQ ID NO: 957 - DNA, 60 bp, Homo sapiens
  source 1..60: mol_type = genomic DNA
acccacaagtgactctaggtgaggctgaccagggaggctcgggccagcaattgtcatttg

SEQ ID NO: 958 - DNA, 60 bp, Homo sapiens
  source 1..60: mol_type = genomic DNA
aaaaacaggagcgaggagtgagcgagcggcgaccctcacctcgcctcccgcctagctcct

SEQ ID NO: 959 - DNA, 60 bp, Homo sapiens
  source 1..60: mol_type = genomic DNA
aggtgccaattccttggggaagggcgacacttggcccgcagccccacaggagccagtacc

SEQ ID NO: 960 - DNA, 60 bp, Homo sapiens
  source 1..60: mol_type = genomic DNA
acaaagaataagtcggtgccccataaatgctgtgagcaaacacagatggagccttaatct

SEQ ID NO: 961 - DNA, 60 bp, Homo sapiens
  source 1..60: mol_type = genomic DNA
gcccacaacccccacccagcctcttccccgggcctgtgcttaccctgacatctccatgtt

SEQ ID NO: 962 - DNA, 60 bp, Homo sapiens
  source 1..60: mol_type = genomic DNA
gctccctgtgcgtggcctcagcagcttggggaggcagtggtcgctctccgctgggcagct

SEQ ID NO: 963 - DNA, 60 bp, Homo sapiens
  source 1..60: mol_type = genomic DNA
gccaccagagcacatctggagggagagggggcggccaccatagggcacagggctccaggc

SEQ ID NO: 964 - DNA, 60 bp, Homo sapiens
  source 1..60: mol_type = genomic DNA
atgtgatctgtcagcagcgccctgtgtggtcatctgagctgcctttcctgccaccaccac

SEQ ID NO: 965 - DNA, 60 bp, Homo sapiens
  source 1..60: mol_type = genomic DNA
accaagtccagtgccctcccactctgccccagcacatgcgccctcatggctgagcgcacc

SEQ ID NO: 966 - DNA, 60 bp, Homo sapiens
  source 1..60: mol_type = genomic DNA
aaaaaaaagccatccccccgctctgccccgtcgcacattcggcccccgcgactcggccag

SEQ ID NO: 967 - DNA, 60 bp, Homo sapiens
  source 1..60: mol_type = genomic DNA
accccaccccctacattatctggcatggagtggtggctcagggcacttttcaaaaattaa

SEQ ID NO: 968 - DNA, 60 bp, Homo sapiens
  source 1..60: mol_type = genomic DNA
gcaacactcctggaatgggaacaggagccggggtcaggtttgccaagcagagaccttcta

SEQ ID NO: 969 - DNA, 60 bp, Homo sapiens
  source 1..60: mol_type = genomic DNA
aatcttcagtgcaatcgcctctgtgttaatgctaggtaaggattacacttcccagggcaa

SEQ ID NO: 970 - DNA, 60 bp, Homo sapiens
  source 1..60: mol_type = genomic DNA
agagaacccaatgccccacctcaagcagaagtcacctgggcacaagtggagattctgctg

SEQ ID NO: 971 - DNA, 60 bp, Homo sapiens
  source 1..60: mol_type = genomic DNA
attcagacacatggatgttgggtctctgtgcggacggtgacaatgtttacaagcaccaca

SEQ ID NO: 972 - DNA, 60 bp, Homo sapiens
  source 1..60: mol_type = genomic DNA
gcctgtgaggggacaattccaagttaaaccttaagttttgagtcctggccagtggcttcc

SEQ ID NO: 973 - DNA, 60 bp, Homo sapiens
  source 1..60: mol_type = genomic DNA
ggccattaccgaagcggatgaaaacaaacactaacgatggcggcgccgggaagcgaccgg

SEQ ID NO: 974 - DNA, 60 bp, Homo sapiens
  source 1..60: mol_type = genomic DNA
gtctcggttatttatcacttccggctgcccacctgggggggctgggccccctctccgctc

SEQ ID NO: 975 - DNA, 60 bp, Homo sapiens
  source 1..60: mol_type = genomic DNA
tcctagaacagggccagcacatgtaggcattcaacacttgtagaactcacgaacgcaagc

SEQ ID NO: 976 - DNA, 60 bp, Homo sapiens
  source 1..60: mol_type = genomic DNA
gcccaaccgcgcgccctcgtaccgcgccggcgcagaaccggcgcagggcagcggtgagcc

SEQ ID NO: 977 - DNA, 60 bp, Homo sapiens
  source 1..60: mol_type = genomic DNA
accaccaaccccaaacacctagtgtagctgtgcctctctgtgaggcacaaggctgagccc

SEQ ID NO: 978 - DNA, 60 bp, Homo sapiens
  source 1..60: mol_type = genomic DNA
gcccgtcagccacgaaaacgtcccagacctgggggcgtgtggcgggacacggacccagca

SEQ ID NO: 979 - DNA, 60 bp, Homo sapiens
  source 1..60: mol_type = genomic DNA
ggctcctccctctcaggcgcctctcctcacaaaccttacccccatagattctgccctttc

SEQ ID NO: 980 - DNA, 60 bp, Homo sapiens
  source 1..60: mol_type = genomic DNA
acctccggtcagccccaggcactgcaagtctagacttatccgaagggcagggcgcacaaa

SEQ ID NO: 981 - DNA, 60 bp, Homo sapiens
  source 1..60: mol_type = genomic DNA
gcccccccatccttgggaactggttcaaccagagtacaaccagctcatctgcatctggcc

SEQ ID NO: 982 - DNA, 60 bp, Homo sapiens
  source 1..60: mol_type = genomic DNA
gccacccctgtgttaacaggtttactggcagatgcaggaggtgacattccagtggctcca

SEQ ID NO: 983 - DNA, 60 bp, Homo sapiens
  source 1..60: mol_type = genomic DNA
acccaggaaagagcaaagcgagcaaaacggaattctctaacatatatcatttggaagtta

SEQ ID NO: 984 - DNA, 60 bp, Homo sapiens
  source 1..60: mol_type = genomic DNA
acccgagcaagactatatattaaggttagacctcttcgtggctatgctgagaaataatag

SEQ ID NO: 985 - DNA, 60 bp, Homo sapiens
  source 1..60: mol_type = genomic DNA
acccccagaggagttgcagtgacccacagtggcaaatcacagaccaaaagcccctgcatg

SEQ ID NO: 986 - DNA, 60 bp, Homo sapiens
  source 1..60: mol_type = genomic DNA
gacggcttagctccgccgcccccgctccacccccactcgcgaactctactcgggagtggt

SEQ ID NO: 987 - DNA, 60 bp, Homo sapiens
  source 1..60: mol_type = genomic DNA
gaaccttgcccttttcctgttgaaactgtacacacctttctatacctaattcaaatactg

SEQ ID NO: 988 - DNA, 60 bp, Homo sapiens
  source 1..60: mol_type = genomic DNA
acctcaccgattcccaagtacacttgagggaggaggaaggaggggtgtgtaatttgttca

SEQ ID NO: 989 - DNA, 60 bp, Homo sapiens
  source 1..60: mol_type = genomic DNA
gagtgtgagctaatggaaatgttttggagaccactgatccaacttgctctagagttaggg

SEQ ID NO: 990 - DNA, 60 bp, Homo sapiens
  source 1..60: mol_type = genomic DNA
gctaagatgaacttcctaagtgagatttcctggtgagccaaatagcactaggactagatg

SEQ ID NO: 991 - DNA, 60 bp, Homo sapiens
  source 1..60: mol_type = genomic DNA
gcccccgtctccatgctgagcccagaacagcacgcacaggcgggaaacaaacctccctcg

SEQ ID NO: 992 - DNA, 60 bp, Homo sapiens
  source 1..60: mol_type = genomic DNA
ggccgttgcaatggcgggcgtggggccggggggctacgcggcggagttcgtgccaccgcc

SEQ ID NO: 993 - DNA, 60 bp, Homo sapiens
  source 1..60: mol_type = genomic DNA
gccccccgggtaagcactgggccacaggctgctcacaacaggccctggcaaactcctttt

SEQ ID NO: 994 - DNA, 60 bp, Homo sapiens
  source 1..60: mol_type = genomic DNA
gccacccgcgtccccaagtagagtgagtgccagtcgccagatggttggagtgtaagccag

SEQ ID NO: 995 - DNA, 60 bp, Homo sapiens
  source 1..60: mol_type = genomic DNA
ttgtcttttccttgtgtccttcacacccagcccccaagagcctgtttatctgcttcctcg

SEQ ID NO: 996 - DNA, 60 bp, Homo sapiens
  source 1..60: mol_type = genomic DNA
aggccctgctctgcacgcacctgcaggacctccagcttcttcttagtggtttcaatgaac

SEQ ID NO: 997 - DNA, 60 bp, Homo sapiens
  source 1..60: mol_type = genomic DNA
agagcaaaacctacagggaaagtctctgatggacctagtttcctgaatggaagcatctgt

SEQ ID NO: 998 - DNA, 60 bp, Homo sapiens
  source 1..60: mol_type = genomic DNA
acccccctttgtctttttctctgacatctgccgcacactctctccagggcatacggtcca

SEQ ID NO: 999 - DNA, 60 bp, Homo sapiens
  source 1..60: mol_type = genomic DNA
ttgccctccccttggccgacgtagttttttaaactttgattcttaatattttaggaagtg

SEQ ID NO: 1000 - DNA, 60 bp, Homo sapiens
  source 1..60: mol_type = genomic DNA
gcttttctatgggagatgatagttcatgtttctcagtgtcaaggaaactgagaaatgttt

SEQ ID NO: 1001 - DNA, 60 bp, Homo sapiens
  source 1..60: mol_type = genomic DNA
gcccccatgcccaaacacagccacttttccacggcaaaggaacaacattttgttattatg

SEQ ID NO: 1002 - DNA, 60 bp, Homo sapiens
  source 1..60: mol_type = genomic DNA
gccccactactatgaaaatcaacaactttgggaactttacctccaagaatcctactagac

SEQ ID NO: 1003 - DNA, 60 bp, Homo sapiens
  source 1..60: mol_type = genomic DNA
ggaatgactgcaaaactgcagattctggagcttatctcagaccttttagttgggagcaca

SEQ ID NO: 1004 - DNA, 60 bp, Homo sapiens
  source 1..60: mol_type = genomic DNA
accatttttgggtgggttggggggggggaaagctggctataacaagaacccggatgtcgc

SEQ ID NO: 1005 - DNA, 60 bp, Homo sapiens
  source 1..60: mol_type = genomic DNA
gccattttccttatacttctgtctctgccctgcatttgcattagttgggtacagctgtct

SEQ ID NO: 1006 - DNA, 60 bp, Homo sapiens
  source 1..60: mol_type = genomic DNA
gccaccccggcttcttgcttaacaagtaacctcaaggaccaagaaagaggttaaagtttc

SEQ ID NO: 1007 - DNA, 60 bp, Homo sapiens
  source 1..60: mol_type = genomic DNA
gcaaaaaaaatgaatcagagttcgcaagacgccacctggattcgcccgcgggccctgagg

SEQ ID NO: 1008 - DNA, 60 bp, Homo sapiens
  source 1..60: mol_type = genomic DNA
gccccccacctttcaaaatcacagtcccttccagtgtgagtggagtaacggtgaacaatt

SEQ ID NO: 1009 - DNA, 60 bp, Homo sapiens
  source 1..60: mol_type = genomic DNA
gccccgcagccctagctcagggtaactccatgggtatcagggctgcagcaccttcaccag

SEQ ID NO: 1010 - DNA, 60 bp, Homo sapiens
  source 1..60: mol_type = genomic DNA
agacccatgcacagcgaggcatcacacgcttgcaaacacatgcaaaagacccacaggcgt

SEQ ID NO: 1011 - DNA, 60 bp, Homo sapiens
  source 1..60: mol_type = genomic DNA
gatgaaaactgaagtcctttatgtccatctttgtgtctaaataaatgagtgtgagcaggc

SEQ ID NO: 1012 - DNA, 60 bp, Homo sapiens
  source 1..60: mol_type = genomic DNA
acgcagaagatcagctacaagacttgcgaaggggctggaaagaaaggtggcctggcccaa

SEQ ID NO: 1013 - DNA, 60 bp, Homo sapiens
  source 1..60: mol_type = genomic DNA
aaaaaaaaatcacacacatgcaacagcacccaggctgctgcttaaccgtacagcaccttt

SEQ ID NO: 1014 - DNA, 60 bp, Homo sapiens
  source 1..60: mol_type = genomic DNA
aaaaaaaatatgtatcaggcctggtggagattatctggggcactttaaggcagggtcagc

SEQ ID NO: 1015 - DNA, 60 bp, Homo sapiens
  source 1..60: mol_type = genomic DNA
agctgcgagcgcgtagggccgcctgctgggccgccggggccatccatccccgtctgtcag

SEQ ID NO: 1016 - DNA, 60 bp, Homo sapiens
  source 1..60: mol_type = genomic DNA
ggctgccatgtggcagccaactggcttgagtggtcccatttgcatccccagcctagtcac

SEQ ID NO: 1017 - DNA, 60 bp, Homo sapiens
  source 1..60: mol_type = genomic DNA
agtctccccagagcaaagggaatgtgacctccagccactgagcttcgtgacccctagtct

SEQ ID NO: 1018 - DNA, 60 bp, Homo sapiens
  source 1..60: mol_type = genomic DNA
gacttcgttctctctatcttttccctctgatttctccagggctggcctccctcatggtgg

SEQ ID NO: 1019 - DNA, 60 bp, Homo sapiens
  source 1..60: mol_type = genomic DNA
acccccgccccacaccatctcggtgactcatcagagatttgtttcagggccacatttcgt

SEQ ID NO: 1020 - DNA, 60 bp, Homo sapiens
  source 1..60: mol_type = genomic DNA
acatctctcattaaacccggcacgcttgccattctccacaggcgcctttagcactttcca

SEQ ID NO: 1021 - DNA, 60 bp, Homo sapiens
  source 1..60: mol_type = genomic DNA
gcttccctgggtactctggcccatcctgtccctgctgccctcagagcctccctggcccgg

SEQ ID NO: 1022 - DNA, 60 bp, Homo sapiens
  source 1..60: mol_type = genomic DNA
gagtgatggggcgcctccgactgcccggccacggtgcctgcacctccgctcctcctctcc

SEQ ID NO: 1023 - DNA, 60 bp, Homo sapiens
  source 1..60: mol_type = genomic DNA
gccccccgcaatatgtcccctgaataaactttgtgggtagtttttcttcattcccagaac

SEQ ID NO: 1024 - DNA, 60 bp, Homo sapiens
  source 1..60: mol_type = genomic DNA
tcccccggcagactccctccttaggtcctggcacggaggtggcactggatccatttccaa

SEQ ID NO: 1025 - DNA, 60 bp, Homo sapiens
  source 1..60: mol_type = genomic DNA
gtaagaattaaagttacaaacacgtcttcaaggagcccaagaggcctgactggccatggt

SEQ ID NO: 1026 - DNA, 60 bp, Homo sapiens
  source 1..60: mol_type = genomic DNA
gatgaggcaggtgcgatgtcacctgtgccccctacgacagggcacagtgccatctgtgcc

SEQ ID NO: 1027 - DNA, 60 bp, Homo sapiens
  source 1..60: mol_type = genomic DNA
gccccaggagagggctggacactgcctttactgtgcatggtcccagaagcacagcataac

SEQ ID NO: 1028 - DNA, 60 bp, Homo sapiens
  source 1..60: mol_type = genomic DNA
gcccattgtgttattttttaaaacaacactattcttggagtttaaggaagggttaaatca

SEQ ID NO: 1029 - DNA, 60 bp, Homo sapiens
  source 1..60: mol_type = genomic DNA
aggaaaaaaaaggcaagtgaagatgatactggaagaccaccactggattcagcagaatga

SEQ ID NO: 1030 - DNA, 60 bp, Homo sapiens
  source 1..60: mol_type = genomic DNA
gcctcaggcaaggtattaggggaataaagcaatctacaccacacgggtcctattgagatt

SEQ ID NO: 1031 - DNA, 60 bp, Homo sapiens
  source 1..60: mol_type = genomic DNA
ttacagcagtaagtcatccgtgtttggtgctttggtggaaaatggtgacagagtagtaag

SEQ ID NO: 1032 - DNA, 60 bp, Homo sapiens
  source 1..60: mol_type = genomic DNA
gaagtaaagtagatcataccagatggatgtgtgtgctcgcacaacagactgaacttatct

SEQ ID NO: 1033 - DNA, 60 bp, Homo sapiens
  source 1..60: mol_type = genomic DNA
accagtgtccagccccggaaggaggtgtgcgactgagcctggtaaatcatgtaccccatt

SEQ ID NO: 1034 - DNA, 60 bp, Homo sapiens
  source 1..60: mol_type = genomic DNA
aactggacctacaatcccttttggagatgaaattcaacaggtaaaagcagtaccagagca

SEQ ID NO: 1035 - DNA, 60 bp, Homo sapiens
  source 1..60: mol_type = genomic DNA
accaacagcatgcacagtgagaggggagggacaaaagtgaggggcataggctggcagagt

SEQ ID NO: 1036 - DNA, 60 bp, Homo sapiens
  source 1..60: mol_type = genomic DNA
actgggttccggaaaggctcagggttgctcccgcgtttcggttcagtgacgtcgtaaatt

SEQ ID NO: 1037 - DNA, 60 bp, Homo sapiens
  source 1..60: mol_type = genomic DNA
acataaacgtctgcatagaaatacaagacaatatcctggagagtttctggagttgagaga

SEQ ID NO: 1038 - DNA, 60 bp, Homo sapiens
  source 1..60: mol_type = genomic DNA
acccccggccgagcaaacacagcactggcccccagagctgggaggatgggaaggggtctc

SEQ ID NO: 1039 - DNA, 60 bp, Homo sapiens
  source 1..60: mol_type = genomic DNA
aagcgaggcccaggcgacggtgcccgcctcttgtccactcggaggagttgcagggattgt

SEQ ID NO: 1040 - DNA, 60 bp, Homo sapiens
  source 1..60: mol_type = genomic DNA
acccttttctgtgatggacagtgactcatctggctaggaatagtgagtatctgagtttgc

SEQ ID NO: 1041 - DNA, 60 bp, Homo sapiens
  source 1..60: mol_type = genomic DNA
acgcccccagtcttttgcacgggtctctggctccaagctctggggctcggagacctgagc

SEQ ID NO: 1042 - DNA, 60 bp, Homo sapiens
  source 1..60: mol_type = genomic DNA
accccggaaattgccctgggtttggccattcttcgcctgacgccctattcaaagtctgag

SEQ ID NO: 1043 - DNA, 60 bp, Homo sapiens
  source 1..60: mol_type = genomic DNA
actccagctgagtgggcactacattatgcagctggtgcatgcagtgggttggctgagcat

SEQ ID NO: 1044 - DNA, 60 bp, Homo sapiens
  source 1..60: mol_type = genomic DNA
acaccattcccccctaaccttctggaatcacgtgttgtatctatttgtacattccagtgc

SEQ ID NO: 1045 - DNA, 60 bp, Homo sapiens
  source 1..60: mol_type = genomic DNA
ttcctctcactctcagaaactcccagacagcgtcctactgtatcgatagctatttctggc

SEQ ID NO: 1046 - DNA, 60 bp, Homo sapiens
  source 1..60: mol_type = genomic DNA
acccgccacctcctgttgtctgaagctcagatcctactcaggtcagtttgactgatggct

SEQ ID NO: 1047 - DNA, 60 bp, Homo sapiens
  source 1..60: mol_type = genomic DNA
gccacagactagtccaaaaagttgaaaactttcaactgggaaaatgcaggcgatgattgt

SEQ ID NO: 1048 - DNA, 60 bp, Homo sapiens
  source 1..60: mol_type = genomic DNA
gcattgaaagattctccagtcctttgaagtctattactcatttctaggattttgtaattc

SEQ ID NO: 1049 - DNA, 60 bp, Homo sapiens
  source 1..60: mol_type = genomic DNA
gccccaattagcgcgagcccagcgcctcccgcgggaagtgcctcctggtgcaccgaggct

SEQ ID NO: 1050 - DNA, 60 bp, Homo sapiens
  source 1..60: mol_type = genomic DNA
accgccccccgccccatggccatccccacctccctagactggagggcccggaaataatga

SEQ ID NO: 1051 - DNA, 60 bp, Homo sapiens
  source 1..60: mol_type = genomic DNA
acagtaaaggagcacacccgaggatctgccgctcccgccacaggcccgaggggttgttca

SEQ ID NO: 1052 - DNA, 60 bp, Homo sapiens
  source 1..60: mol_type = genomic DNA
gccctcgcctggctttttccagtgaggaaatggcagcacaagtggttgggcagcatgctt

SEQ ID NO: 1053 - DNA, 60 bp, Homo sapiens
  source 1..60: mol_type = genomic DNA
aggatgcctttcctgccccctctttgccctgtcacctcctaaggatgctctcaggacgca

SEQ ID NO: 1054 - DNA, 60 bp, Homo sapiens
  source 1..60: mol_type = genomic DNA
aggccccttgatctccccgtgggtctccccagcggcgaaaacgggagctgggtaggtccg

SEQ ID NO: 1055 - DNA, 60 bp, Homo sapiens
  source 1..60: mol_type = genomic DNA
actctctgcctagtctggcttgtcactcacagtccctaggggacatccgtgccagctgcc

SEQ ID NO: 1056 - DNA, 60 bp, Homo sapiens
  source 1..60: mol_type = genomic DNA
aagtaggcaccatggcctgttttcaaaactttatattctgtccaatttgactaaccagct

SEQ ID NO: 1057 - DNA, 60 bp, Homo sapiens
  source 1..60: mol_type = genomic DNA
gaccccagtttggatacctgaagcctaccccaggcgattgaacacaaagcatttcactaa

SEQ ID NO: 1058 - DNA, 60 bp, Homo sapiens
  source 1..60: mol_type = genomic DNA
gaattcagacctcctgtggtaatgaatgggtgtaattgaagctgtaagattacgcaaagg

SEQ ID NO: 1059 - DNA, 60 bp, Homo sapiens
  source 1..60: mol_type = genomic DNA
gccccagcactcggcgggcgcaggctgagctggtgacccgggcaggaccggagccaaagg

SEQ ID NO: 1060 - DNA, 60 bp, Homo sapiens
  source 1..60: mol_type = genomic DNA
aaatcattagagaaatgcctgaatcgtgttttctgttgatatttcctaagcacctagatg

SEQ ID NO: 1061 - DNA, 60 bp, Homo sapiens
  source 1..60: mol_type = genomic DNA
gccctaggaatcttacggggcaagaggaaagggaacagtcccagcaggtcagacccccag

SEQ ID NO: 1062 - DNA, 60 bp, Homo sapiens
  source 1..60: mol_type = genomic DNA
gtttgtggatctgaatctggaaaagagcttggagagatttacaggcctcctcttctgcaa

SEQ ID NO: 1063 - DNA, 60 bp, Homo sapiens
  source 1..60: mol_type = genomic DNA
gcagttttgtgttaaatgacttcaaggtcaccgattggagactaggtcacctgttgggga

SEQ ID NO: 1064 - DNA, 60 bp, Homo sapiens
  source 1..60: mol_type = genomic DNA
gcagaagctgctggtaaattttgggactaaaatctatgagccacatgaatcttactctgc

SEQ ID NO: 1065 - DNA, 60 bp, Homo sapiens
  source 1..60: mol_type = genomic DNA
aaaactgtgcggtcacaaaacccagctgcatgaagtaagatgtgcagaaatgggtcaaaa

SEQ ID NO: 1066 - DNA, 60 bp, Homo sapiens
  source 1..60: mol_type = genomic DNA
acttcctgtaagagcccacaaatgacagatcccagaaagccaacttcagaaaaaacacat

SEQ ID NO: 1067 - DNA, 60 bp, Homo sapiens
  source 1..60: mol_type = genomic DNA
ttctgttaactgcatcttcccgacttcaacacccagctcatgctgtcatctcatgttcat

SEQ ID NO: 1068 - DNA, 60 bp, Homo sapiens
  source 1..60: mol_type = genomic DNA
gccccaccgcccacttcggaagtggggtttgcttggggagagggaaaagacagagttgag

SEQ ID NO: 1069 - DNA, 60 bp, Homo sapiens
  source 1..60: mol_type = genomic DNA
tgggcacaactggaggccctgaaaggacactgcgggtgccctgtcttgctggcctggccc

SEQ ID NO: 1070 - DNA, 60 bp, Homo sapiens
  source 1..60: mol_type = genomic DNA
atagatccctgcctggaatgagtcaggggaatgtcttcgccttgctaaggtccagtgtcc

SEQ ID NO: 1071 - DNA, 60 bp, Homo sapiens
  source 1..60: mol_type = genomic DNA
gcccagcccacaatagtgcggtgggtgggcattcggcttccgtccacatcttcgctctgc

SEQ ID NO: 1072 - DNA, 60 bp, Homo sapiens
  source 1..60: mol_type = genomic DNA
aaaatacacaccctcgagtccggcgttacccgccaccaggctcccgcccggcccccggcc

SEQ ID NO: 1073 - DNA, 60 bp, Homo sapiens
  source 1..60: mol_type = genomic DNA
gccaaataaaatagagacgttttagtagctgcactggaggcccttaggtaattggttact

SEQ ID NO: 1074 - DNA, 60 bp, Homo sapiens
  source 1..60: mol_type = genomic DNA
acaggagtctaagatgaggaaacaggtccacggccactgctcacacttccccaccaaaag

SEQ ID NO: 1075 - DNA, 60 bp, Homo sapiens
  source 1..60: mol_type = genomic DNA
acattacaatcatctgggccacacagacaaactccatcagattctctgggggcgagcctc

SEQ ID NO: 1076 - DNA, 60 bp, Homo sapiens
  source 1..60: mol_type = genomic DNA
agcttctgggacctccaacaacatcaggttctgaggttctggctgccaggatttgtctga

SEQ ID NO: 1077 - DNA, 60 bp, Homo sapiens
  source 1..60: mol_type = genomic DNA
actttatttctaatacgaggtggaaggaggaaggtgggtggcgaaatagagctgcaaaag

SEQ ID NO: 1078 - DNA, 60 bp, Homo sapiens
  source 1..60: mol_type = genomic DNA
aattcctggaccttgtctccttttctgccccttgttgcccaacctctaactgggctccca

SEQ ID NO: 1079 - DNA, 60 bp, Homo sapiens
  source 1..60: mol_type = genomic DNA
gcccacgaaactagtacagaacctgacaaactgcccacacacaaaacaatttttgagaag

SEQ ID NO: 1080 - DNA, 60 bp, Homo sapiens
  source 1..60: mol_type = genomic DNA
accaccaccaccagggtaataagaggtgaagggaaatcgtaaatatgactacatctacag

SEQ ID NO: 1081 - DNA, 60 bp, Homo sapiens
  source 1..60: mol_type = genomic DNA
atcaaccttgatcccacaaaccaagttgggtataatggagaccaagattggctgctcctg

SEQ ID NO: 1082 - DNA, 60 bp, Homo sapiens
  source 1..60: mol_type = genomic DNA
atcaactgaggcaagtccacctgccgctttcctcaggagctctccaagctgggcctgggg

SEQ ID NO: 1083 - DNA, 60 bp, Homo sapiens
  source 1..60: mol_type = genomic DNA
ggttattcagacagggagccaggatgggaaccacggactgacctgacctgcgtcctcggg

SEQ ID NO: 1084 - DNA, 60 bp, Homo sapiens
  source 1..60: mol_type = genomic DNA
gctcatagaggatgcaggcccacggatgcgtcctgtacctgtccctgggtcatctcaacg

SEQ ID NO: 1085 - DNA, 60 bp, Homo sapiens
  source 1..60: mol_type = genomic DNA
aactggttgtcttggcatctagcagagcccacctccctatgctcctgcccctcctggact

SEQ ID NO: 1086 - DNA, 60 bp, Homo sapiens
  source 1..60: mol_type = genomic DNA
gccccccgcaaagtgaaggctgagtaactttctcagacccaaacccttagtgttgcacaa

SEQ ID NO: 1087 - DNA, 60 bp, Homo sapiens
  source 1..60: mol_type = genomic DNA
actcttggctttggaatttgggctgagttgtatatgaacctggtctccttggccaatatc

SEQ ID NO: 1088 - DNA, 60 bp, Homo sapiens
  source 1..60: mol_type = genomic DNA
acaaataacatttgggctgtaaggggatgtttcgcaaatcagacacgttgtttactttta

SEQ ID NO: 1089 - DNA, 60 bp, Homo sapiens
  source 1..60: mol_type = genomic DNA
atattaggtgcctcgtgtttcagaaccttaagcttggtttcccctggcggacaggaactt

SEQ ID NO: 1090 - DNA, 60 bp, Homo sapiens
  source 1..60: mol_type = genomic DNA
gccgtagaatgggtagaagaaggggctgtagaagtgacctctagactgtgctgaccagta

SEQ ID NO: 1091 - DNA, 60 bp, Homo sapiens
  source 1..60: mol_type = genomic DNA
gccaaggagcatggtcgggcacttgcaaaggttcaggctctgcatccacatgcctaggtg

SEQ ID NO: 1092 - DNA, 60 bp, Homo sapiens
  source 1..60: mol_type = genomic DNA
gccaaatgtcccagatactagaggatgtccccgctatttacataagagtccctttccagt

SEQ ID NO: 1093 - DNA, 60 bp, Homo sapiens
  source 1..60: mol_type = genomic DNA
acccctaaaaaatgagcttcatgatcaagtacattttggaaccctcaggctgatccaagt

SEQ ID NO: 1094 - DNA, 60 bp, Homo sapiens
  source 1..60: mol_type = genomic DNA
accttaaggcatgcttcctctaggaggcttcggctaccctgggacggttagaggccacgc

SEQ ID NO: 1095 - DNA, 60 bp, Homo sapiens
  source 1..60: mol_type = genomic DNA
gcagagcccagctacctctcgggaattgtagtttggcctgtattcccccggcgattcctt

SEQ ID NO: 1096 - DNA, 60 bp, Homo sapiens
  source 1..60: mol_type = genomic DNA
actgagtcggagctagcaccttggacagcaccacggcttctctgttttctactgctgtcc

SEQ ID NO: 1097 - DNA, 60 bp, Homo sapiens
  source 1..60: mol_type = genomic DNA
acttgtatcactttgtatgacagtcttcttgggaacatccattgggaaactcttcccttg

SEQ ID NO: 1098 - DNA, 60 bp, Homo sapiens
  source 1..60: mol_type = genomic DNA
gccaaattgtcccgttgtctcttggctggtcttgccagctggcacacagcttcctctgac

SEQ ID NO: 1099 - DNA, 60 bp, Homo sapiens
  source 1..60: mol_type = genomic DNA
ttttgaaagtaaatgctttgataacagggtggtttccccagatggccagagagtagaggt

SEQ ID NO: 1100 - DNA, 60 bp, Homo sapiens
  source 1..60: mol_type = genomic DNA
gccccgggcatctccaaactgctgtcctgtggatagccccagttgcatgtgctcaaaagc

SEQ ID NO: 1101 - DNA, 60 bp, Homo sapiens
  source 1..60: mol_type = genomic DNA
accgccccgcctccaatcctctaccattactaaatcatcattttgctctggagagtaact

SEQ ID NO: 1102 - DNA, 60 bp, Homo sapiens
  source 1..60: mol_type = genomic DNA
gcccacagacacacacaggagacaacccgagagatcactgccagccctgggaaaatgagt

SEQ ID NO: 1103 - DNA, 60 bp, Homo sapiens
  source 1..60: mol_type = genomic DNA
accagcaggctgcttgcaggcccgctgaagatgctgtgacggggagagcatatggcgggc

SEQ ID NO: 1104 - DNA, 60 bp, Homo sapiens
  source 1..60: mol_type = genomic DNA
gcaagaggatcagagagaccacagagggattgcaatgttctctgagctgggcacacggga

SEQ ID NO: 1105 - DNA, 60 bp, Homo sapiens
  source 1..60: mol_type = genomic DNA
gttaactgccacgtgcagcccaagctgagaccctggctctgctttcttccagagcagctt

SEQ ID NO: 1106 - DNA, 60 bp, Homo sapiens
  source 1..60: mol_type = genomic DNA
gccccctgtgggagcagaggcaggcacgacttggtggaaggaggttcgaggcagcagggc

SEQ ID NO: 1107 - DNA, 60 bp, Homo sapiens
  source 1..60: mol_type = genomic DNA
accgccgccaggctgtcttgctgagtgacaagctgtcctggactctcagaccacggaacc

SEQ ID NO: 1108 - DNA, 60 bp, Homo sapiens
  source 1..60: mol_type = genomic DNA
gcacaagtggatcaaagtcaactgaggtccaaccccacagcgggcagcgggagggcggtc

SEQ ID NO: 1109 - DNA, 60 bp, Homo sapiens
  source 1..60: mol_type = genomic DNA
gccatctccattcatttgggaaagtgtatgatggtttagttgctagcaatatgagtgaaa

SEQ ID NO: 1110 - DNA, 60 bp, Homo sapiens
  source 1..60: mol_type = genomic DNA
gcttcctgctccttagcatgcgtgcagctctctcctgttttgggtgttccccttggacac

SEQ ID NO: 1111 - DNA, 60 bp, Homo sapiens
  source 1..60: mol_type = genomic DNA
gcccgccgatgggattcggtgggaaagttggttgtttaaggcggggtcagggcacccctc

SEQ ID NO: 1112 - DNA, 60 bp, Homo sapiens
  source 1..60: mol_type = genomic DNA
gcccataccgcgctccccacaatttcgccgtccctccgcccccatccggggctttggccc

SEQ ID NO: 1113 - DNA, 60 bp, Homo sapiens
  source 1..60: mol_type = genomic DNA
acccttggaaatattaaaaagaaacttaagtaaatatatgcaggaggaataaagcccctc

SEQ ID NO: 1114 - DNA, 60 bp, Homo sapiens
  source 1..60: mol_type = genomic DNA
gccggacacacacacctgactaggccccagatgtgggtgcccagcagagctcccagtcac

SEQ ID NO: 1115 - DNA, 60 bp, Homo sapiens
  source 1..60: mol_type = genomic DNA
ggcttcccgggcactcgcgccttcagcctcttaaatctcactgcatcatctcttaccttg

SEQ ID NO: 1116 - DNA, 60 bp, Homo sapiens
  source 1..60: mol_type = genomic DNA
gcttaatttctgcgtcacgggaagcacgagtttccgacagggaggattgatgtgtgcagt

SEQ ID NO: 1117 - DNA, 60 bp, Homo sapiens
  source 1..60: mol_type = genomic DNA
aactcccctgaacaccagcaccagtggactagcacctggagtgtccggtgtgtgagtagg

SEQ ID NO: 1118 - DNA, 60 bp, Homo sapiens
  source 1..60: mol_type = genomic DNA
gtccctctacagcctggatagtgagcactgagagcccactgaccacagctgcccttctcc

SEQ ID NO: 1119 - DNA, 60 bp, Homo sapiens
  source 1..60: mol_type = genomic DNA
acaccaaacagcaagcagattgtacatcactccttctgaggcacacagatggcttttgaa

SEQ ID NO: 1120 - DNA, 60 bp, Homo sapiens
  source 1..60: mol_type = genomic DNA
tttgcttgtcactgcccatatccaggcctgggaaggtcctgccagccagcgacacccaca

SEQ ID NO: 1121 - DNA, 60 bp, Homo sapiens
  source 1..60: mol_type = genomic DNA
gcccgctttgaggaaggcacagccctgcctttctcactgtcacttcagtgacacttcagc

SEQ ID NO: 1122 - DNA, 60 bp, Homo sapiens
  source 1..60: mol_type = genomic DNA
attaaaaccacacctgtacccctacccaccaaacactctctgggtaattgtggtctgtga

SEQ ID NO: 1123 - DNA, 60 bp, Homo sapiens
  source 1..60: mol_type = genomic DNA
ggagaatctctgctaagctcccagacctcctcctgttcccttctggtcccttcagccccc

SEQ ID NO: 1124 - DNA, 60 bp, Homo sapiens
  source 1..60: mol_type = genomic DNA
agagctgctattgttggcttactgccaccccatcctgaaggaaggccaattctccttcct

SEQ ID NO: 1125 - DNA, 60 bp, Homo sapiens
  source 1..60: mol_type = genomic DNA
tttgtgtctattgtcagtattagtttcacctaaattcagggcctgtcatcctgtgtaaca

SEQ ID NO: 1126 - DNA, 60 bp, Homo sapiens
  source 1..60: mol_type = genomic DNA
aactctggggtctcccctccagcactccagcctcaggagtctggggacctctcctgatag

SEQ ID NO: 1127 - DNA, 60 bp, Homo sapiens
  source 1..60: mol_type = genomic DNA
acccactgtgaaggggtgccatactaccttaaatgctaatgctagatatgcaaaactgga

SEQ ID NO: 1128 - DNA, 60 bp, Homo sapiens
  source 1..60: mol_type = genomic DNA
gcaacgaccacattgcttttcccgccctcgcgagggattgtgggccagcccccaacggcc

SEQ ID NO: 1129 - DNA, 60 bp, Homo sapiens
  source 1..60: mol_type = genomic DNA
gacacacactcctccagcctgataccctgctggggttcttttgcagagttttgtcttgag

SEQ ID NO: 1130 - DNA, 60 bp, Homo sapiens
  source 1..60: mol_type = genomic DNA
acccgctacagcccaggtcctggttctgtcctccccagatgctgctagagaaactgaacg

SEQ ID NO: 1131 - DNA, 60 bp, Homo sapiens
  source 1..60: mol_type = genomic DNA
agagaaggctttctggtcccaaaatgcaaagggctgtgaatgtgcagaagataaggaact

SEQ ID NO: 1132 - DNA, 60 bp, Homo sapiens
  source 1..60: mol_type = genomic DNA
aggagcttggcggagcaaccaggtaccccgtgacatgacataacacattcagccaaagtc

SEQ ID NO: 1133 - DNA, 60 bp, Homo sapiens
  source 1..60: mol_type = genomic DNA
gctttacccagcttcttcaggtgttaaagcatctcctttagtttaggtttgctcaaataa

SEQ ID NO: 1134 - DNA, 60 bp, Homo sapiens
  source 1..60: mol_type = genomic DNA
acccttttgggctcttgcaaaaattcgcctcaattaaattattgttgtggtgaatcggcc

SEQ ID NO: 1135 - DNA, 60 bp, Homo sapiens
  source 1..60: mol_type = genomic DNA
ggcttaggctctgcatctttggggggctctgggcttctttgggggacagttctttccagg

SEQ ID NO: 1136 - DNA, 60 bp, Homo sapiens
  source 1..60: mol_type = genomic DNA
ggccacaaatatatgcctagagaaggaacaaggcagccagtgcctggcccaggagcagga

SEQ ID NO: 1137 - DNA, 60 bp, Homo sapiens
  source 1..60: mol_type = genomic DNA
acagatgagaactgtcccctgaaagaggcttctagcaggaggatccccaggctgactgtg

SEQ ID NO: 1138 - DNA, 60 bp, Homo sapiens
  source 1..60: mol_type = genomic DNA
gccgcgcgcgcacgcctgacgtcagcggccagcgtgagtcacgcgcgcagggagagcgcg

SEQ ID NO: 1139 - DNA, 60 bp, Homo sapiens
  source 1..60: mol_type = genomic DNA
aggagtgtgtccctgggagatggtgggtaggggacagctcgtgggaaccagattagtgtc

SEQ ID NO: 1140 - DNA, 60 bp, Homo sapiens
  source 1..60: mol_type = genomic DNA
gccggggagtgaaacagctgctggagacttgatcctggcccagatgtagccagggaagga

SEQ ID NO: 1141 - DNA, 60 bp, Homo sapiens
  source 1..60: mol_type = genomic DNA
accgagcaatgggctactgtgaggatgccgccttggtgcctttgcccacctgccaggagg

SEQ ID NO: 1142 - DNA, 60 bp, Homo sapiens
  source 1..60: mol_type = genomic DNA
actccctacctcttaccaggtcagccatcccctctgttcttggtgtcaccttcttgccgt

SEQ ID NO: 1143 - DNA, 60 bp, Homo sapiens
  source 1..60: mol_type = genomic DNA
aaccagagcaactttggtcagaagtcacacctaatcaccctctctgcaggatatgctggg

SEQ ID NO: 1144 - DNA, 60 bp, Homo sapiens
  source 1..60: mol_type = genomic DNA
gcccccggcccagttcacaagagcccttgccgcacagcccgccccagcctgctgtccagg

SEQ ID NO: 1145 - DNA, 60 bp, Homo sapiens
  source 1..60: mol_type = genomic DNA
gccccactcaccaccccatgagcctaacctacgcccatgcctggagaggtgacctggcca

SEQ ID NO: 1146 - DNA, 60 bp, Homo sapiens
  source 1..60: mol_type = genomic DNA
agagcacacagcagtggcccctatccaaggcctgcgggggctgtcaggctgccagagcag

SEQ ID NO: 1147 - DNA, 60 bp, Homo sapiens
  source 1..60: mol_type = genomic DNA
ggtttaaaattgatcagattaaattagtctaatcaataggaacaaaagaggcatgtactt

SEQ ID NO: 1148 - DNA, 60 bp, Homo sapiens
  source 1..60: mol_type = genomic DNA
tcagccatcttgcgaggcagctaggctggctcaggaagcctgggtcctccttccagctgg

SEQ ID NO: 1149 - DNA, 60 bp, Homo sapiens
  source 1..60: mol_type = genomic DNA
accccaaattgtccctggtctccgtctgaagggcccgagtgtgtgtacggaaagattaag

SEQ ID NO: 1150 - DNA, 60 bp, Homo sapiens
  source 1..60: mol_type = genomic DNA
acgcacaccttgttttaatgctttatgttcgaaatgtaagtagcatataaaatgtactcg

SEQ ID NO: 1151 - DNA, 60 bp, Homo sapiens
  source 1..60: mol_type = genomic DNA
aaaaggggaatcctagccatttcctgccagaatgagcagttggcatcaatatcgtcaaac

SEQ ID NO: 1152 - DNA, 60 bp, Homo sapiens
  source 1..60: mol_type = genomic DNA
actttctactgcaagaagaataaaagagctgagtaatctggtttggggcgagtgttagcc

SEQ ID NO: 1153 - DNA, 60 bp, Homo sapiens
  source 1..60: mol_type = genomic DNA
atgtcccatctcccatgcttattctgtcattacagagtacagagtgcaaacactttgacc

SEQ ID NO: 1154 - DNA, 60 bp, Homo sapiens
  source 1..60: mol_type = genomic DNA
gcagtgcccactccattgcctgtctcagggcccaatgctgcccagcagtggcatagaagt

SEQ ID NO: 1155 - DNA, 60 bp, Homo sapiens
  source 1..60: mol_type = genomic DNA
ttttactggctgttgcctatacttctgaaaagttctagtgtctactccagaccaaagtct

SEQ ID NO: 1156 - DNA, 60 bp, Homo sapiens
  source 1..60: mol_type = genomic DNA
gtgccaggacctgttggcgggcatccaggttctgctggcggtcgcccagcttccagtgtc

SEQ ID NO: 1157 - DNA, 60 bp, Homo sapiens
  source 1..60: mol_type = genomic DNA
gcccacttttaacaccaggctgaagtaaataaagatagagacaattgtaactactgagtt

SEQ ID NO: 1158 - DNA, 60 bp, Homo sapiens
  source 1..60: mol_type = genomic DNA
gccactttgctaaatgtaaatgctaattgttgcattttacagttagataggatatacttc

SEQ ID NO: 1159 - DNA, 60 bp, Homo sapiens
  source 1..60: mol_type = genomic DNA
gcccgacgccagaacccacggggcggggcctcgcctggaatggggcatcctctctagagg

SEQ ID NO: 1160 - DNA, 60 bp, Homo sapiens
  source 1..60: mol_type = genomic DNA
acccccgagccggcactcctgggtttgagcttcgtctgtgagccctcggccgcgcccctt

SEQ ID NO: 1161 - DNA, 60 bp, Homo sapiens
  source 1..60: mol_type = genomic DNA
gccctccccgcgcgcgtgcgcgccgcggccgcgcctgcgcagtgtagccgggtcagctgg

SEQ ID NO: 1162 - DNA, 60 bp, Homo sapiens
  source 1..60: mol_type = genomic DNA
ggaagccactgcacacagacagaacggggacaggcggcgggtcttttgtttttttgatgt

SEQ ID NO: 1163 - DNA, 60 bp, Homo sapiens
  source 1..60: mol_type = genomic DNA
atgcccagtggcagcgtttggggttgaaacaggttgggggagggcactttcagtctgaat

SEQ ID NO: 1164 - DNA, 60 bp, Homo sapiens
  source 1..60: mol_type = genomic DNA
acccgcacaggtgcaggccccctcggcgctggggatgtggaagtcggattgttctctggg

SEQ ID NO: 1165 - DNA, 60 bp, Homo sapiens
  source 1..60: mol_type = genomic DNA
aacccgccgggacagtcagggcctcggacggccttggcctcgggcctggggcgctccgga

SEQ ID NO: 1166 - DNA, 60 bp, Homo sapiens
  source 1..60: mol_type = genomic DNA
gccaccccatctccaggaacaatggcagagagggcggtttcagcgaacaaatacaccgat

SEQ ID NO: 1167 - DNA, 60 bp, Homo sapiens
  source 1..60: mol_type = genomic DNA
agcctagtgtgaacctgcccctcgtcccacgtatagaaaaacctcgagtcatggtgaatg

SEQ ID NO: 1168 - DNA, 60 bp, Homo sapiens
  source 1..60: mol_type = genomic DNA
acgccgataagagctcgaacgcgaaactgctctgctgcgggacccggggaccagacccct

SEQ ID NO: 1169 - DNA, 60 bp, Homo sapiens
  source 1..60: mol_type = genomic DNA
gcccaccttggcaccagcctgcctgggggacagccccaggaacccttttcctgagctttc

SEQ ID NO: 1170 - DNA, 60 bp, Homo sapiens
  source 1..60: mol_type = genomic DNA
aagccattctcccctgcctgcctgcgaccgcttacctgctgctccatcgcagcttcgctc

SEQ ID NO: 1171 - DNA, 60 bp, Homo sapiens
  source 1..60: mol_type = genomic DNA
aaaaagaccactgctgggtttccttaagtctgtctttccccagaaggagacacaggaggg

SEQ ID NO: 1172 - DNA, 60 bp, Homo sapiens
  source 1..60: mol_type = genomic DNA
gccccttccttttctcctccagactacaaaccaggagcggtggcctgggatcgggccaac

SEQ ID NO: 1173 - DNA, 60 bp, Homo sapiens
  source 1..60: mol_type = genomic DNA
ggttttcctcaagtcgcttctctcagtctctgcttagatgaatgtgtgcgcatgtgcaag

SEQ ID NO: 1174 - DNA, 60 bp, Homo sapiens
  source 1..60: mol_type = genomic DNA
gttcttgtgtttccatttggattggagccgaaattcctgaaagggcctatttttgtcact

SEQ ID NO: 1175 - DNA, 60 bp, Homo sapiens
  source 1..60: mol_type = genomic DNA
aggctgggcacccctcatgggccatggcttcggggacagcaaccttgcttgtgacaccag

SEQ ID NO: 1176 - DNA, 60 bp, Homo sapiens
  source 1..60: mol_type = genomic DNA
actccactaggcaaaccttccagagaagcccaacttggaggatgtgaggcggggtggggc

SEQ ID NO: 1177 - DNA, 60 bp, Homo sapiens
  source 1..60: mol_type = genomic DNA
acataaaccccttgatgaacggaacagcatcagacatagctcctcactcacacggcgatg

SEQ ID NO: 1178 - DNA, 60 bp, Homo sapiens
  source 1..60: mol_type = genomic DNA
gcccgccccgggggtctcccctccttgaccattcaggttcaagcttctctctgtgcagat

SEQ ID NO: 1179 - DNA, 60 bp, Homo sapiens
  source 1..60: mol_type = genomic DNA
gctgtggctgccagctctcacacccggcatacgctggattcttattttagctactgtgac

SEQ ID NO: 1180 - DNA, 60 bp, Homo sapiens
  source 1..60: mol_type = genomic DNA
agccacctttccctgggctgtcctgtcggcggtgacacagtgccaacgccacagtgctgg

SEQ ID NO: 1181 - DNA, 60 bp, Homo sapiens
  source 1..60: mol_type = genomic DNA
accttcccagggagtctggaaaggtcacccccagagtcacaggaggacttagagcgcagt

SEQ ID NO: 1182 - DNA, 60 bp, Homo sapiens
  source 1..60: mol_type = genomic DNA
gcactcagcctagtccctgcttctaggggtaggagtctcggttgccagcaacccctagca

SEQ ID NO: 1183 - DNA, 60 bp, Homo sapiens
  source 1..60: mol_type = genomic DNA
aactgctcctgcactccctgagggagttccctccctccttcttaggatggaagcagggct

SEQ ID NO: 1184 - DNA, 60 bp, Homo sapiens
  source 1..60: mol_type = genomic DNA
ggttcctcttacttggtgcacttcccgtccaggaggaagtagccctgcaggcagctctcg

SEQ ID NO: 1185 - DNA, 60 bp, Homo sapiens
  source 1..60: mol_type = genomic DNA
acgtcactcagcccctgggctttgccccccagggtccccaaatccccagatcccaaggca

SEQ ID NO: 1186 - DNA, 60 bp, Homo sapiens
  source 1..60: mol_type = genomic DNA
gcccccgccttcctgccccctccccaggtttctggctgcccagtccctaacctcttgggg

SEQ ID NO: 1187 - DNA, 60 bp, Homo sapiens
  source 1..60: mol_type = genomic DNA
atcttcgggaccaggatttgcacagaagcacatgcacctacccatacaccccctcttctg

SEQ ID NO: 1188 - DNA, 60 bp, Homo sapiens
  source 1..60: mol_type = genomic DNA
acgcccgcgcagacgcggtgacgcgacggactgtggaacgccgtcgcctagcaacgcgag

SEQ ID NO: 1189 - DNA, 60 bp, Homo sapiens
  source 1..60: mol_type = genomic DNA
atagctctgggcgctgcagggaggaggagcagagagactcgctctgagccttcatttcct

SEQ ID NO: 1190 - DNA, 60 bp, Homo sapiens
  source 1..60: mol_type = genomic DNA
agctccttgctgggaccctgagccctgcacggatctcagtttccctagaaggtctcccga

SEQ ID NO: 1191 - DNA, 60 bp, Homo sapiens
  source 1..60: mol_type = genomic DNA
gctcacaattctgggtgttagaaagtatattaaaagtctaactgtgaggagcgggagagg

SEQ ID NO: 1192 - DNA, 60 bp, Homo sapiens
  source 1..60: mol_type = genomic DNA
atgaagaccttcaagtagttcagcctactgctgaatctggacgtcccgattcccccctcc

SEQ ID NO: 1193 - DNA, 60 bp, Homo sapiens
  source 1..60: mol_type = genomic DNA
gtggtgaggggcgcagagccaggtgtatgtaacagccacttccctcaccccacttttcag

SEQ ID NO: 1194 - DNA, 60 bp, Homo sapiens
  source 1..60: mol_type = genomic DNA
aaaatccctgcctcagctccagaaactccttccactcggggctccactgcttctctttct

SEQ ID NO: 1195 - DNA, 60 bp, Homo sapiens
  source 1..60: mol_type = genomic DNA
accaccacacacacaccctgttggtcccatcctcagggcgtggtggtccaggtgaacgct

SEQ ID NO: 1196 - DNA, 60 bp, Homo sapiens
  source 1..60: mol_type = genomic DNA
aatacatttcaaaactccaagttgagagatctggtttcctgtgttttgggagtaggataa

SEQ ID NO: 1197 - DNA, 60 bp, Homo sapiens
  source 1..60: mol_type = genomic DNA
aatgtccctcaagggagtacaagagtcaccagcatgactgcccatcctgcgtgtcctcct

SEQ ID NO: 1198 - DNA, 60 bp, Homo sapiens
  source 1..60: mol_type = genomic DNA
gcccaccgaacccacgcacacaggcatctgcacccatatgctacttgctctcctgtcaat

SEQ ID NO: 1199 - DNA, 60 bp, Homo sapiens
  source 1..60: mol_type = genomic DNA
agggcacgcacggtctggcgctcacccaaacagccctcggaggaaggagtgggaggcctt

SEQ ID NO: 1200 - DNA, 60 bp, Homo sapiens
  source 1..60: mol_type = genomic DNA
gctccgcgcgaagcctcacctgcccagcgcccgcttcattcccgcgtcggctgcgcagcg

SEQ ID NO: 1201 - DNA, 60 bp, Homo sapiens
  source 1..60: mol_type = genomic DNA
accaaaacacgtctagacgtgcccgtgcgaggacatttggtcccggcctacactcctatc

SEQ ID NO: 1202 - DNA, 60 bp, Homo sapiens
  source 1..60: mol_type = genomic DNA
actcccagccgggctgcagccgcggagccgtcccccctgcactgacagctggtatctaat

SEQ ID NO: 1203 - DNA, 60 bp, Homo sapiens
  source 1..60: mol_type = genomic DNA
acctttggccctgaatctgaagcagtttcctcttatcccatagttaacatttttagtaca

SEQ ID NO: 1204 - DNA, 60 bp, Homo sapiens
  source 1..60: mol_type = genomic DNA
accagctccctgcaggcctgctctctgccattcatcctctggaattagcttgcagagacc

SEQ ID NO: 1205 - DNA, 60 bp, Homo sapiens
  source 1..60: mol_type = genomic DNA
ttaccctggccctcaggggatattattagccttcctttcctgccaagagagcaggactgg

SEQ ID NO: 1206 - DNA, 60 bp, Homo sapiens
  source 1..60: mol_type = genomic DNA
aagagtagcggcggagggaagagaagggagtgctgcaggtgtacttccaagttcaaaatc

SEQ ID NO: 1207 - DNA, 60 bp, Homo sapiens
  source 1..60: mol_type = genomic DNA
gcgcttgtccccgatggcggcagcatgaacaaggcctccgttgcaacgttatcgaaaaca

SEQ ID NO: 1208 - DNA, 60 bp, Homo sapiens
  source 1..60: mol_type = genomic DNA
atctcatacctccagaccttttccacttgcagtcctggtaggttttcagcaattttattt

SEQ ID NO: 1209 - DNA, 60 bp, Homo sapiens
  source 1..60: mol_type = genomic DNA
gtccgccgccccccacccaagccttaagctcctgggttaaaaaatccaactgttggatta

SEQ ID NO: 1210 - DNA, 60 bp, Homo sapiens
  source 1..60: mol_type = genomic DNA
gcccccagtcttgctttcctttctcctatattcagggttaaaattagaaattgcttgttt

SEQ ID NO: 1211 - DNA, 60 bp, Homo sapiens
  source 1..60: mol_type = genomic DNA
aacaaaaaagcctagatccaaatttgggggaagaggctgcattaccctgcatgaaaaaaa

SEQ ID NO: 1212 - DNA, 60 bp, Homo sapiens
  source 1..60: mol_type = genomic DNA
aacactggccagctcctggtggacacaagtccctcctctccccgagcattggaagaacaa

SEQ ID NO: 1213 - DNA, 60 bp, Homo sapiens
  source 1..60: mol_type = genomic DNA
gcccagtgaatatcttatttctggatacttaagattagaaatgaaatataagacagaggt

SEQ ID NO: 1214 - DNA, 60 bp, Homo sapiens
  source 1..60: mol_type = genomic DNA
agtttttcagatgtgggaagtgaggcctcaggatgtctgtgacagcccagcacccacagc

SEQ ID NO: 1215 - DNA, 60 bp, Homo sapiens
  source 1..60: mol_type = genomic DNA
tttttccagggaactttggcgaccgctactttgggacagacgcggtccccgatggcagtg

SEQ ID NO: 1216 - DNA, 60 bp, Homo sapiens
  source 1..60: mol_type = genomic DNA
aatctatctaacccgatgaaccaagctaggattctttagggcagttattattgggaggag

SEQ ID NO: 1217 - DNA, 60 bp, Homo sapiens
  source 1..60: mol_type = genomic DNA
gcccccgctgcactctgccttccatgtctcgtgttagtgcattctaatggatgaggccta

SEQ ID NO: 1218 - DNA, 60 bp, Homo sapiens
  source 1..60: mol_type = genomic DNA
attggtgtctgccgtcactgaaagtgattctgggtacaattctattttgttttgaacttg

SEQ ID NO: 1219 - DNA, 60 bp, Homo sapiens
  source 1..60: mol_type = genomic DNA
ggaatgtacctctcccttctccataaattgacctgttcttcaactcaaaccctttgtctg

SEQ ID NO: 1220 - DNA, 60 bp, Homo sapiens
  source 1..60: mol_type = genomic DNA
acacacacacgagaaactcatggtggtgctctaaagaaattaaacccaaggtcgtactct

SEQ ID NO: 1221 - DNA, 60 bp, Homo sapiens
  source 1..60: mol_type = genomic DNA
aaccttatttggaattaagaagcacaggactttgagaagagatagtgttatttcagtaaa

SEQ ID NO: 1222 - DNA, 60 bp, Homo sapiens
  source 1..60: mol_type = genomic DNA
gggcgcccccacccctttccgccgtctcgcggggccccagacccaggcgaagggggcggg

SEQ ID NO: 1223 - DNA, 60 bp, Homo sapiens
  source 1..60: mol_type = genomic DNA
actgcctagatcaaatggacccaccctgcggaacgtgcccctggctcggacacacgcttt

SEQ ID NO: 1224 - DNA, 60 bp, Homo sapiens
  source 1..60: mol_type = genomic DNA
aagaggagaacctgggcagcgccagggttttggggaatcctgtgcctccatccgcccacc

SEQ ID NO: 1225 - DNA, 60 bp, Homo sapiens
  source 1..60: mol_type = genomic DNA
ttcttcctggactcctgtgtcttcattcaccgctgtcctagtgtctaattcatcactgtc

SEQ ID NO: 1226 - DNA, 60 bp, Homo sapiens
  source 1..60: mol_type = genomic DNA
gctggcactgcccagtgtcactcaaggccactcacacccaggatgacgatcgtgatattt

SEQ ID NO: 1227 - DNA, 60 bp, Homo sapiens
  source 1..60: mol_type = genomic DNA
gcgagtccgtccgctgcacagccaatcagcggtcggcgcgcgcggcatcacgggagttgt

SEQ ID NO: 1228 - DNA, 60 bp, Homo sapiens
  source 1..60: mol_type = genomic DNA
acccgtctgccaagcatgggtatgaatcgtgcacacagccatgcttcaaggccggggcag

SEQ ID NO: 1229 - DNA, 60 bp, Homo sapiens
  source 1..60: mol_type = genomic DNA
acagcctccatacagagccacttccccagcgtgcccacggggccagctctagcggggagt

SEQ ID NO: 1230 - DNA, 60 bp, Homo sapiens
  source 1..60: mol_type = genomic DNA
gcccaacatcccggcagatccatggcaggggcgcctcacaggctggtccacggccacggt

SEQ ID NO: 1231 - DNA, 60 bp, Homo sapiens
  source 1..60: mol_type = genomic DNA
aactccacgcacacctcagggtgtgaagcccccagcctgtgcctgtcccccagtcaacgc

SEQ ID NO: 1232 - DNA, 60 bp, Homo sapiens
  source 1..60: mol_type = genomic DNA
acctcggagccctcagacccagcctgcggggtgccacggcagccacttacgtagatgagc

SEQ ID NO: 1233 - DNA, 60 bp, Homo sapiens
  source 1..60: mol_type = genomic DNA
accactccccgcagcaccccggagaccgctgagttcctgggtgaggacctgctgcaggta

SEQ ID NO: 1234 - DNA, 60 bp, Homo sapiens
  source 1..60: mol_type = genomic DNA
gctttcccgccccgcgacccggaagtggttctagggcaggcgggcgggtttgagagggcg

SEQ ID NO: 1235 - DNA, 60 bp, Homo sapiens
  source 1..60: mol_type = genomic DNA
acatcactttgtatctctgtggaactcccctcatttcttttgaggggtgggagaaaacaa

SEQ ID NO: 1236 - DNA, 60 bp, Homo sapiens
  source 1..60: mol_type = genomic DNA
agcccccgatggagcccagacgtaagggaaattagattgctctccaagatatttggctgg

SEQ ID NO: 1237 - DNA, 60 bp, Homo sapiens
  source 1..60: mol_type = genomic DNA
attaagtgtgcattttagtctgtcagtttacatggagtgctccggtggaggtttagggtg

SEQ ID NO: 1238 - DNA, 60 bp, Homo sapiens
  source 1..60: mol_type = genomic DNA
gggagtctgcatttcctgcccctggacatcatgggctgtgtccagaacatccctctcaga

SEQ ID NO: 1239 - DNA, 60 bp, Homo sapiens
  source 1..60: mol_type = genomic DNA
gtcacaccaatgatcctgaaggacgctccaggcactggtcggcaagggcgcctctcaggg

SEQ ID NO: 1240 - DNA, 60 bp, Homo sapiens
  source 1..60: mol_type = genomic DNA
ggcgctcccgggtcctaaggaacatcggcgcgcactcaggagggagggttcgagtcccgc

SEQ ID NO: 1241 - DNA, 60 bp, Homo sapiens
  source 1..60: mol_type = genomic DNA
gcccgctccagtcctaactccccacggctccagggcgcagggcccatccttgacagcctg

SEQ ID NO: 1242 - DNA, 60 bp, Homo sapiens
  source 1..60: mol_type = genomic DNA
gcctccggcctccatcccttcagctcgggtctagccagaaactgacgtccacctcaagtg

SEQ ID NO: 1243 - DNA, 60 bp, Homo sapiens
  source 1..60: mol_type = genomic DNA
ggagccaacctggtctacactaaccattttataacatttgtcatcttataaaatactact

SEQ ID NO: 1244 - DNA, 60 bp, Homo sapiens
  source 1..60: mol_type = genomic DNA
accaacttgctttgaaaaagcaaagcttaaaagcctctattgtgtggagggggggaatat

SEQ ID NO: 1245 - DNA, 60 bp, Homo sapiens
  source 1..60: mol_type = genomic DNA
gccccatcccccccatccggaagcagcccagggccgtctgtggtccaggtttcaggagct

SEQ ID NO: 1246 - DNA, 60 bp, Homo sapiens
  source 1..60: mol_type = genomic DNA
aaccgcgagtgtgggaattcggcgtcgcgggagctctctgatccactcaggggtcagggc

SEQ ID NO: 1247 - DNA, 60 bp, Homo sapiens
  source 1..60: mol_type = genomic DNA
ttttaatacctagatagccttttttttctgtgataacatctgctttcaaaatagctaatc

SEQ ID NO: 1248 - DNA, 60 bp, Homo sapiens
  source 1..60: mol_type = genomic DNA
acacccccaatcaacctttctttttttgcctagcttttttattgccttttactcaagccc

SEQ ID NO: 1249 - DNA, 60 bp, Homo sapiens
  source 1..60: mol_type = genomic DNA
aacaaggaggccatatttagattacctcctggaaagttacttaactctctggaatttgaa

SEQ ID NO: 1250 - DNA, 60 bp, Homo sapiens
  source 1..60: mol_type = genomic DNA
acccgccactgcggcccctagcctgtagtatttcttagcctcagcctgggcccggtgttc

SEQ ID NO: 1251 - DNA, 60 bp, Homo sapiens
  source 1..60: mol_type = genomic DNA
atcaaatccccatcagattaagaatctctcaaccctagtgctttggatttgacttccaca

SEQ ID NO: 1252 - DNA, 60 bp, Homo sapiens
  source 1..60: mol_type = genomic DNA
atgaattcctcatcatagaggcttgggacttccattagccacctaacaacggtgtctgtg

SEQ ID NO: 1253 - DNA, 60 bp, Homo sapiens
  source 1..60: mol_type = genomic DNA
aggaaatagggtaggcaggggtggggtcagcaggcaaagacgcagcttttccagtggcaa

SEQ ID NO: 1254 - DNA, 60 bp, Homo sapiens
  source 1..60: mol_type = genomic DNA
acaacagtgtagtcaaagtttctcttggaatattactataaatatgaagtttcttaactc

SEQ ID NO: 1255 - DNA, 60 bp, Homo sapiens
  source 1..60: mol_type = genomic DNA
gcaaagtaatgtttgctatgacagaattacagtatgtctggaagagtttgtacttctctg

SEQ ID NO: 1256 - DNA, 60 bp, Homo sapiens
  source 1..60: mol_type = genomic DNA
atgggtggcccaaaatggagaacgcggagcagcgcaagatggaggctccgcttctctgtg

SEQ ID NO: 1257 - DNA, 60 bp, Homo sapiens
  source 1..60: mol_type = genomic DNA
aaaaaaaagccttttctcgccctgccctgctagccagcctcccttcggatcgtcggatcc

SEQ ID NO: 1258 - DNA, 60 bp, Homo sapiens
  source 1..60: mol_type = genomic DNA
gccccttcctgctacattctgaaagagaagaactttccacaacaaagaaggccattacta

SEQ ID NO: 1259 - DNA, 60 bp, Homo sapiens
  source 1..60: mol_type = genomic DNA
aaccccaccaagtaatagcagactgattaggttcatgttatcacctggaaagatgtgctc

SEQ ID NO: 1260 - DNA, 60 bp, Homo sapiens
  source 1..60: mol_type = genomic DNA
acagcccatgcccgctgtgatcccgatgaaaggggctaggaatccacctaggaagttccc

SEQ ID NO: 1261 - DNA, 16 bp, Homo sapiens
  source 1..16: mol_type = genomic DNA
cccccccccccccccc

SEQ ID NO: 1262 - DNA, 12 bp, Homo sapiens
  source 1..12: mol_type = genomic DNA
cccccccccccc

SEQ ID NO: 1263 - DNA, 18 bp, Homo sapiens
  source 1..18: mol_type = genomic DNA
cccccccccccccccccc

SEQ ID NO: 1264 - DNA, 12 bp, Homo sapiens
  source 1..12: mol_type = genomic DNA
cccccccccccc

SEQ ID NO: 1265 - DNA, 14 bp, Homo sapiens
  source 1..14: mol_type = genomic DNA
cccccccccccccc

SEQ ID NO: 1266 - DNA, 12 bp, Homo sapiens
  source 1..12: mol_type = genomic DNA
cccccccccccc

SEQ ID NO: 1267 - DNA, 15 bp, Homo sapiens
  source 1..15: mol_type = genomic DNA
ccccccccccccccc

SEQ ID NO: 1268 - DNA, 14 bp, Homo sapiens
  source 1..14: mol_type = genomic DNA
cccccccccccccc

SEQ ID NO: 1269 - DNA, 14 bp, Homo sapiens
  source 1..14: mol_type = genomic DNA
cccccccccccccc

SEQ ID NO: 1270 - DNA, 12 bp, Homo sapiens
  source 1..12: mol_type = genomic DNA
cccccccccccc

SEQ ID NO: 1271 - DNA, 17 bp, Homo sapiens
  source 1..17: mol_type = genomic DNA
ccccccccccccccccc

SEQ ID NO: 1272 - DNA, 13 bp, Homo sapiens
  source 1..13: mol_type = genomic DNA
ccccccccccccc

SEQ ID NO: 1273 - DNA, 15 bp, Homo sapiens
  source 1..15: mol_type = genomic DNA
ccccccccccccccc

SEQ ID NO: 1274 - DNA, 13 bp, Homo sapiens
  source 1..13: mol_type = genomic DNA
ccccccccccccc

SEQ ID NO: 1275 - DNA, 17 bp, Homo sapiens
  source 1..17: mol_type = genomic DNA
ccccccccccccccccc

SEQ ID NO: 1276 - DNA, 12 bp, Homo sapiens
  source 1..12: mol_type = genomic DNA
cccccccccccc

SEQ ID NO: 1277 - DNA, 14 bp, Homo sapiens
  source 1..14: mol_type = genomic DNA
cccccccccccccc

SEQ ID NO: 1278 - DNA, 13 bp, Homo sapiens
  source 1..13: mol_type = genomic DNA
ccccccccccccc

SEQ ID NO: 1279 - DNA, 13 bp, Homo sapiens
  source 1..13: mol_type = genomic DNA
ccccccccccccc

SEQ ID NO: 1280 - DNA, 12 bp, Homo sapiens
  source 1..12: mol_type = genomic DNA
cccccccccccc

SEQ ID NO: 1281 - DNA, 18 bp, Homo sapiens
  source 1..18: mol_type = genomic DNA
cccccccccccccccccc

SEQ ID NO: 1282 - DNA, 12 bp, Homo sapiens
  source 1..12: mol_type = genomic DNA
cccccccccccc

SEQ ID NO: 1283 - DNA, 14 bp, Homo sapiens
  source 1..14: mol_type = genomic DNA
cccccccccccccc

SEQ ID NO: 1284 - DNA, 13 bp, Homo sapiens
  source 1..13: mol_type = genomic DNA
ccccccccccccc

SEQ ID NO: 1285 - DNA, 13 bp, Homo sapiens
  source 1..13: mol_type = genomic DNA
ccccccccccccc

SEQ ID NO: 1286 - DNA, 15 bp, Homo sapiens
  source 1..15: mol_type = genomic DNA
ccccccccccccccc

SEQ ID NO: 1287 - DNA, 13 bp, Homo sapiens
  source 1..13: mol_type = genomic DNA
ccccccccccccc

SEQ ID NO: 1288 - DNA, 13 bp, Homo sapiens
  source 1..13: mol_type = genomic DNA
ccccccccccccc

SEQ ID NO: 1289 - DNA, 12 bp, Homo sapiens
  source 1..12: mol_type = genomic DNA
cccccccccccc

SEQ ID NO: 1290 - DNA, 15 bp, Homo sapiens
  source 1..15: mol_type = genomic DNA
ccccccccccccccc

SEQ ID NO: 1291 - DNA, 12 bp, Homo sapiens
  source 1..12: mol_type = genomic DNA
cccccccccccc

SEQ ID NO: 1292 - DNA, 15 bp, Homo sapiens
  source 1..15: mol_type = genomic DNA
ccccccccccccccc

SEQ ID NO: 1293 - DNA, 16 bp, Homo sapiens
  source 1..16: mol_type = genomic DNA
cccccccccccccccc

SEQ ID NO: 1294 - DNA, 12 bp, Homo sapiens
  source 1..12: mol_type = genomic DNA
cccccccccccc

SEQ ID NO: 1295 - DNA, 13 bp, Homo sapiens
  source 1..13: mol_type = genomic DNA
ccccccccccccc

SEQ ID NO: 1296 - DNA, 12 bp, Homo sapiens
  source 1..12: mol_type = genomic DNA
cccccccccccc

SEQ ID NO: 1297 - DNA, 14 bp, Homo sapiens
  source 1..14: mol_type = genomic DNA
cccccccccccccc

SEQ ID NO: 1298 - DNA, 13 bp, Homo sapiens
  source 1..13: mol_type = genomic DNA
ccccccccccccc

SEQ ID NO: 1299 - DNA, 18 bp, Homo sapiens
  source 1..18: mol_type = genomic DNA
cccccccccccccccccc

SEQ ID NO: 1300 - DNA, 13 bp, Homo sapiens
  source 1..13: mol_type = genomic DNA
ccccccccccccc

SEQ ID NO: 1301 - DNA, 18 bp, Homo sapiens
  source 1..18: mol_type = genomic DNA
cccccccccccccccccc

SEQ ID NO: 1302 - DNA, 13 bp, Homo sapiens
  source 1..13: mol_type = genomic DNA
ccccccccccccc

SEQ ID NO: 1303 - DNA, 15 bp, Homo sapiens
  source 1..15: mol_type = genomic DNA
ccccccccccccccc

SEQ ID NO: 1304 - DNA, 13 bp, Homo sapiens
  source 1..13: mol_type = genomic DNA
ccccccccccccc

SEQ ID NO: 1305 - DNA, 13 bp, Homo sapiens
  source 1..13: mol_type = genomic DNA
ccccccccccccc

SEQ ID NO: 1306 - DNA, 13 bp, Homo sapiens
  source 1..13: mol_type = genomic DNA
ccccccccccccc

SEQ ID NO: 1307 - DNA, 27 bp, Homo sapiens
  source 1..27: mol_type = genomic DNA
ccccccccccccccccccccccccccc

SEQ ID NO: 1308 - DNA, 17 bp, Homo sapiens
  source 1..17: mol_type = genomic DNA
ccccccccccccccccc

SEQ ID NO: 1309 - DNA, 13 bp, Homo sapiens
  source 1..13: mol_type = genomic DNA
ccccccccccccc

SEQ ID NO: 1310 - DNA, 13 bp, Homo sapiens
  source 1..13: mol_type = genomic DNA
ccccccccccccc

SEQ ID NO: 1311 - DNA, 15 bp, Homo sapiens
  source 1..15: mol_type = genomic DNA
ccccccccccccccc

SEQ ID NO: 1312 - DNA, 15 bp, Homo sapiens
  source 1..15: mol_type = genomic DNA
ccccccccccccccc

SEQ ID NO: 1313 - DNA, 12 bp, Homo sapiens
  source 1..12: mol_type = genomic DNA
cccccccccccc

SEQ ID NO: 1314 - DNA, 12 bp, Homo sapiens
  source 1..12: mol_type = genomic DNA
cccccccccccc

SEQ ID NO: 1315 - DNA, 12 bp, Homo sapiens
  source 1..12: mol_type = genomic DNA
cccccccccccc

SEQ ID NO: 1316 - DNA, 13 bp, Homo sapiens
  source 1..13: mol_type = genomic DNA
ccccccccccccc

SEQ ID NO: 1317 - DNA, 12 bp, Homo sapiens
  source 1..12: mol_type = genomic DNA
cccccccccccc

SEQ ID NO: 1318 - DNA, 13 bp, Homo sapiens
  source 1..13: mol_type = genomic DNA
ccccccccccccc

SEQ ID NO: 1319 - DNA, 13 bp, Homo sapiens
  source 1..13: mol_type = genomic DNA
ccccccccccccc

SEQ ID NO: 1320 - DNA, 12 bp, Homo sapiens
  source 1..12: mol_type = genomic DNA
cccccccccccc

SEQ ID NO: 1321 - DNA, 13 bp, Homo sapiens
  source 1..13: mol_type = genomic DNA
ccccccccccccc

SEQ ID NO: 1322 - DNA, 15 bp, Homo sapiens
  source 1..15: mol_type = genomic DNA
ccccccccccccccc

SEQ ID NO: 1323 - DNA, 17 bp, Homo sapiens
  source 1..17: mol_type = genomic DNA
ccccccccccccccccc

SEQ ID NO: 1324 - DNA, 12 bp, Homo sapiens
  source 1..12: mol_type = genomic DNA
cccccccccccc

SEQ ID NO: 1325 - DNA, 15 bp, Homo sapiens
  source 1..15: mol_type = genomic DNA
ccccccccccccccc

SEQ ID NO: 1326 - DNA, 12 bp, Homo sapiens
  source 1..12: mol_type = genomic DNA
cccccccccccc

SEQ ID NO: 1327 - DNA, 13 bp, Homo sapiens
  source 1..13: mol_type = genomic DNA
ccccccccccccc

SEQ ID NO: 1328 - DNA, 12 bp, Homo sapiens
  source 1..12: mol_type = genomic DNA
cccccccccccc

SEQ ID NO: 1329 - DNA, 13 bp, Homo sapiens
  source 1..13: mol_type = genomic DNA
ccccccccccccc

SEQ ID NO: 1330 - DNA, 21 bp, Homo sapiens
  source 1..21: mol_type = genomic DNA
ccccccccccccccccccccc

SEQ ID NO: 1331 - DNA, 12 bp, Homo sapiens
  source 1..12: mol_type = genomic DNA
cccccccccccc

SEQ ID NO: 1332 - DNA, 17 bp, Homo sapiens
  source 1..17: mol_type = genomic DNA
ccccccccccccccccc

SEQ ID NO: 1333 - DNA, 13 bp, Homo sapiens
  source 1..13: mol_type = genomic DNA
ccccccccccccc

SEQ ID NO: 1334 - DNA, 15 bp, Homo sapiens
  source 1..15: mol_type = genomic DNA
ccccccccccccccc

SEQ ID NO: 1335 - DNA, 16 bp, Homo sapiens
  source 1..16: mol_type = genomic DNA
cccccccccccccccc

SEQ ID NO: 1336 - DNA, 12 bp, Homo sapiens
  source 1..12: mol_type = genomic DNA
cccccccccccc

SEQ ID NO: 1337 - DNA, 15 bp, Homo sapiens
  source 1..15: mol_type = genomic DNA
ccccccccccccccc

SEQ ID NO: 1338 - DNA, 12 bp, Homo sapiens
  source 1..12: mol_type = genomic DNA
cccccccccccc

SEQ ID NO: 1339 - DNA, 15 bp, Homo sapiens
  source 1..15: mol_type = genomic DNA
ccccccccccccccc

SEQ ID NO: 1340 - DNA, 13 bp, Homo sapiens
  source 1..13: mol_type = genomic DNA
ccccccccccccc

SEQ ID NO: 1341 - DNA, 14 bp, Homo sapiens
  source 1..14: mol_type = genomic DNA
cccccccccccccc

SEQ ID NO: 1342 - DNA, 12 bp, Homo sapiens
  source 1..12: mol_type = genomic DNA
cccccccccccc

SEQ ID NO: 1343 - DNA, 17 bp, Homo sapiens
  source 1..17: mol_type = genomic DNA
ccccccccccccccccc

SEQ ID NO: 1344 - DNA, 12 bp, Homo sapiens
  source 1..12: mol_type = genomic DNA
cccccccccccc

SEQ ID NO: 1345 - DNA, 12 bp, Homo sapiens
  source 1..12: mol_type = genomic DNA
cccccccccccc

SEQ ID NO: 1346 - DNA, 13 bp, Homo sapiens
  source 1..13: mol_type = genomic DNA
ccccccccccccc

SEQ ID NO: 1347 - DNA, 15 bp, Homo sapiens
  source 1..15: mol_type = genomic DNA
ccccccccccccccc

SEQ ID NO: 1348 - DNA, 14 bp, Homo sapiens
  source 1..14: mol_type = genomic DNA
cccccccccccccc

SEQ ID NO: 1349 - DNA, 13 bp, Homo sapiens
  source 1..13: mol_type = genomic DNA
ccccccccccccc

SEQ ID NO: 1350 - DNA, 12 bp, Homo sapiens
  source 1..12: mol_type = genomic DNA
cccccccccccc

SEQ ID NO: 1351 - DNA, 12 bp, Homo sapiens
  source 1..12: mol_type = genomic DNA
cccccccccccc

SEQ ID NO: 1352 - DNA, 13 bp, Homo sapiens
  source 1..13: mol_type = genomic DNA
ccccccccccccc

SEQ ID NO: 1353 - DNA, 12 bp, Homo sapiens
  source 1..12: mol_type = genomic DNA
cccccccccccc

SEQ ID NO: 1354 - DNA, 12 bp, Homo sapiens
  source 1..12: mol_type = genomic DNA
cccccccccccc

SEQ ID NO: 1355 - DNA, 12 bp, Homo sapiens
  source 1..12: mol_type = genomic DNA
cccccccccccc

SEQ ID NO: 1356 - DNA, 14 bp, Homo sapiens
  source 1..14: mol_type = genomic DNA
cccccccccccccc

SEQ ID NO: 1357 - DNA, 13 bp, Homo sapiens
  source 1..13: mol_type = genomic DNA
ccccccccccccc

SEQ ID NO: 1358 - DNA, 14 bp, Homo sapiens
  source 1..14: mol_type = genomic DNA
cccccccccccccc

SEQ ID NO: 1359 - DNA, 17 bp, Homo sapiens
  source 1..17: mol_type = genomic DNA
ccccccccccccccccc

SEQ ID NO: 1360 - DNA, 15 bp, Homo sapiens
  source 1..15: mol_type = genomic DNA
ccccccccccccccc

SEQ ID NO: 1361 - DNA, 17 bp, Homo sapiens
  source 1..17: mol_type = genomic DNA
ccccccccccccccccc

SEQ ID NO: 1362 - DNA, 12 bp, Homo sapiens
  source 1..12: mol_type = genomic DNA
cccccccccccc

SEQ ID NO: 1363 - DNA, 12 bp, Homo sapiens
  source 1..12: mol_type = genomic DNA
cccccccccccc

SEQ ID NO: 1364 - DNA, 13 bp, Homo sapiens
  source 1..13: mol_type = genomic DNA
ccccccccccccc

SEQ ID NO: 1365 - DNA, 14 bp, Homo sapiens
  source 1..14: mol_type = genomic DNA
cccccccccccccc

SEQ ID NO: 1366 - DNA, 12 bp, Homo sapiens
  source 1..12: mol_type = genomic DNA
cccccccccccc

SEQ ID NO: 1367 - DNA, 15 bp, Homo sapiens
  source 1..15: mol_type = genomic DNA
ccccccccccccccc

SEQ ID NO: 1368 - DNA, 20 bp, Homo sapiens
  source 1..20: mol_type = genomic DNA
cccccccccccccccccccc

SEQ ID NO: 1369 - DNA, 12 bp, Homo sapiens
  source 1..12: mol_type = genomic DNA
cccccccccccc

SEQ ID NO: 1370 - DNA, 12 bp, Homo sapiens
  source 1..12: mol_type = genomic DNA
cccccccccccc

SEQ ID NO: 1371 - DNA, 13 bp, Homo sapiens
  source 1..13: mol_type = genomic DNA
ccccccccccccc

SEQ ID NO: 1372 - DNA, 12 bp, Homo sapiens
  source 1..12: mol_type = genomic DNA
cccccccccccc

SEQ ID NO: 1373 - DNA, 13 bp, Homo sapiens
  source 1..13: mol_type = genomic DNA
ccccccccccccc

SEQ ID NO: 1374 - DNA, 12 bp, Homo sapiens
  source 1..12: mol_type = genomic DNA
cccccccccccc

SEQ ID NO: 1375 - DNA, 12 bp, Homo sapiens
  source 1..12: mol_type = genomic DNA
cccccccccccc

SEQ ID NO: 1376 - DNA, 12 bp, Homo sapiens
  source 1..12: mol_type = genomic DNA
cccccccccccc

SEQ ID NO: 1377 - DNA, 13 bp, Homo sapiens
  source 1..13: mol_type = genomic DNA
ccccccccccccc

SEQ ID NO: 1378 - DNA, 13 bp, Homo sapiens
  source 1..13: mol_type = genomic DNA
ccccccccccccc

SEQ ID NO: 1379 - DNA, 14 bp, Homo sapiens
  source 1..14: mol_type = genomic DNA
cccccccccccccc

SEQ ID NO: 1380 - DNA, 12 bp, Homo sapiens
  source 1..12: mol_type = genomic DNA
cccccccccccc

SEQ ID NO: 1381 - DNA, 12 bp, Homo sapiens
  source 1..12: mol_type = genomic DNA
cccccccccccc

SEQ ID NO: 1382 - DNA, 15 bp, Homo sapiens
  source 1..15: mol_type = genomic DNA
ccccccccccccccc

SEQ ID NO: 1383 - DNA, 13 bp, Homo sapiens
  source 1..13: mol_type = genomic DNA
ccccccccccccc

SEQ ID NO: 1384 - DNA, 13 bp, Homo sapiens
  source 1..13: mol_type = genomic DNA
ccccccccccccc

SEQ ID NO: 1385 - DNA, 27 bp, Homo sapiens
  source 1..27: mol_type = genomic DNA
ccccccccccccccccccccccccccc

SEQ ID NO: 1386 - DNA, 13 bp, Homo sapiens
  source 1..13: mol_type = genomic DNA
ccccccccccccc

SEQ ID NO: 1387 - DNA, 12 bp, Homo sapiens
  source 1..12: mol_type = genomic DNA
cccccccccccc

SEQ ID NO: 1388 - DNA, 14 bp, Homo sapiens
  source 1..14: mol_type = genomic DNA
cccccccccccccc

SEQ ID NO: 1389 - DNA, 15 bp, Homo sapiens
  source 1..15: mol_type = genomic DNA
ccccccccccccccc

SEQ ID NO: 1390 - DNA, 12 bp, Homo sapiens
  source 1..12: mol_type = genomic DNA
cccccccccccc

SEQ ID NO: 1391 - DNA, 14 bp, Homo sapiens
  source 1..14: mol_type = genomic DNA
cccccccccccccc

SEQ ID NO: 1392 - DNA, 12 bp, Homo sapiens
  source 1..12: mol_type = genomic DNA
cccccccccccc

SEQ ID NO: 1393 - DNA, 14 bp, Homo sapiens
  source 1..14: mol_type = genomic DNA
cccccccccccccc

SEQ ID NO: 1394 - DNA, 12 bp, Homo sapiens
  source 1..12: mol_type = genomic DNA
cccccccccccc

SEQ ID NO: 1395 - DNA, 12 bp, Homo sapiens
  source 1..12: mol_type = genomic DNA
cccccccccccc

SEQ ID NO: 1396 - DNA, 17 bp, Homo sapiens
  source 1..17: mol_type = genomic DNA
ccccccccccccccccc

SEQ ID NO: 1397 - DNA, 12 bp, Homo sapiens
  source 1..12: mol_type = genomic DNA
cccccccccccc

SEQ ID NO: 1398 - DNA, 12 bp, Homo sapiens
  source 1..12: mol_type = genomic DNA
cccccccccccc

SEQ ID NO: 1399 - DNA, 14 bp, Homo sapiens
  source 1..14: mol_type = genomic DNA
cccccccccccccc

SEQ ID NO: 1400 - DNA, 21 bp, Homo sapiens
  source 1..21: mol_type = genomic DNA
ccccccccccccccccccccc

SEQ ID NO: 1401 - DNA, 12 bp, Homo sapiens
  source 1..12: mol_type = genomic DNA
cccccccccccc

SEQ ID NO: 1402 - DNA, 13 bp, Homo sapiens
  source 1..13: mol_type = genomic DNA
ccccccccccccc

SEQ ID NO: 1403 - DNA, 23 bp, Homo sapiens
  source 1..23: mol_type = genomic DNA
ccccccccccccccccccccccc

SEQ ID NO: 1404 - DNA, 14 bp, Homo sapiens
  source 1..14: mol_type = genomic DNA
cccccccccccccc

SEQ ID NO: 1405 - DNA, 15 bp, Homo sapiens
  source 1..15: mol_type = genomic DNA
ccccccccccccccc

SEQ ID NO: 1406 - DNA, 12 bp, Homo sapiens
  source 1..12: mol_type = genomic DNA
cccccccccccc

SEQ ID NO: 1407 - DNA, 13 bp, Homo sapiens
  source 1..13: mol_type = genomic DNA
ccccccccccccc

SEQ ID NO: 1408 - DNA, 13 bp, Homo sapiens
  source 1..13: mol_type = genomic DNA
ccccccccccccc

SEQ ID NO: 1409 - DNA, 12 bp, Homo sapiens
  source 1..12: mol_type = genomic DNA
cccccccccccc

SEQ ID NO: 1410 - DNA, 13 bp, Homo sapiens
  source 1..13: mol_type = genomic DNA
ccccccccccccc

SEQ ID NO: 1411 - DNA, 12 bp, Homo sapiens
  source 1..12: mol_type = genomic DNA
cccccccccccc

SEQ ID NO: 1412 - DNA, 12 bp, Homo sapiens
  source 1..12: mol_type = genomic DNA
cccccccccccc

SEQ ID NO: 1413 - DNA, 12 bp, Homo sapiens
  source 1..12: mol_type = genomic DNA
cccccccccccc

SEQ ID NO: 1414 - DNA, 13 bp, Homo sapiens
  source 1..13: mol_type = genomic DNA
ccccccccccccc

SEQ ID NO: 1415 - DNA, 18 bp, Homo sapiens
  source 1..18: mol_type = genomic DNA
cccccccccccccccccc

SEQ ID NO: 1416 - DNA, 14 bp, Homo sapiens
  source 1..14: mol_type = genomic DNA
cccccccccccccc

SEQ ID NO: 1417 - DNA, 12 bp, Homo sapiens
  source 1..12: mol_type = genomic DNA
cccccccccccc

SEQ ID NO: 1418 - DNA, 13 bp, Homo sapiens
  source 1..13: mol_type = genomic DNA
ccccccccccccc

SEQ ID NO: 1419 - DNA, 12 bp, Homo sapiens
  source 1..12: mol_type = genomic DNA
cccccccccccc

SEQ ID NO: 1420 - DNA, 19 bp, Homo sapiens
  source 1..19: mol_type = genomic DNA
ccccccccccccccccccc

SEQ ID NO: 1421 - DNA, 15 bp, Homo sapiens
  source 1..15: mol_type = genomic DNA
ccccccccccccccc

SEQ ID NO: 1422 - DNA, 12 bp, Homo sapiens
  source 1..12: mol_type = genomic DNA
cccccccccccc

SEQ ID NO: 1423 - DNA, 12 bp, Homo sapiens
  source 1..12: mol_type = genomic DNA
cccccccccccc

SEQ ID NO: 1424 - DNA, 15 bp, Homo sapiens
  source 1..15: mol_type = genomic DNA
ccccccccccccccc

SEQ ID NO: 1425 - DNA, 13 bp, Homo sapiens
  source 1..13: mol_type = genomic DNA
ccccccccccccc

SEQ ID NO: 1426 - DNA, 14 bp, Homo sapiens
  source 1..14: mol_type = genomic DNA
cccccccccccccc

SEQ ID NO: 1427 - DNA, 14 bp, Homo sapiens
  source 1..14: mol_type = genomic DNA
cccccccccccccc

SEQ ID NO: 1428 - DNA, 13 bp, Homo sapiens
  source 1..13: mol_type = genomic DNA
ccccccccccccc

SEQ ID NO: 1429 - DNA, 12 bp, Homo sapiens
  source 1..12: mol_type = genomic DNA
cccccccccccc

SEQ ID NO: 1430 - DNA, 14 bp, Homo sapiens
  source 1..14: mol_type = genomic DNA
cccccccccccccc

SEQ ID NO: 1431 - DNA, 13 bp, Homo sapiens
  source 1..13: mol_type = genomic DNA
ccccccccccccc

SEQ ID NO: 1432 - DNA, 15 bp, Homo sapiens
  source 1..15: mol_type = genomic DNA
ccccccccccccccc

SEQ ID NO: 1433 - DNA, 12 bp, Homo sapiens
  source 1..12: mol_type = genomic DNA
cccccccccccc

SEQ ID NO: 1434 - DNA, 12 bp, Homo sapiens
  source 1..12: mol_type = genomic DNA
cccccccccccc

SEQ ID NO: 1435 - DNA, 16 bp, Homo sapiens
  source 1..16: mol_type = genomic DNA
cccccccccccccccc

SEQ ID NO: 1436 - DNA, 12 bp, Homo sapiens
  source 1..12: mol_type = genomic DNA
cccccccccccc

SEQ ID NO: 1437 - DNA, 14 bp, Homo sapiens
  source 1..14: mol_type = genomic DNA
cccccccccccccc

SEQ ID NO: 1438 - DNA, 12 bp, Homo sapiens
  source 1..12: mol_type = genomic DNA
cccccccccccc

SEQ ID NO: 1439 - DNA, 13 bp, Homo sapiens
  source 1..13: mol_type = genomic DNA
ccccccccccccc

SEQ ID NO: 1440 - DNA, 13 bp, Homo sapiens
  source 1..13: mol_type = genomic DNA
ccccccccccccc

SEQ ID NO: 1441 - DNA, 16 bp, Homo sapiens
  source 1..16: mol_type = genomic DNA
cccccccccccccccc

SEQ ID NO: 1442 - DNA, 13 bp, Homo sapiens
  source 1..13: mol_type = genomic DNA
ccccccccccccc

SEQ ID NO: 1443 - DNA, 16 bp, Homo sapiens
  source 1..16: mol_type = genomic DNA
cccccccccccccccc

SEQ ID NO: 1444 - DNA, 12 bp, Homo sapiens
  source 1..12: mol_type = genomic DNA
cccccccccccc

SEQ ID NO: 1445 - DNA, 12 bp, Homo sapiens
  source 1..12: mol_type = genomic DNA
cccccccccccc

SEQ ID NO: 1446 - DNA, 14 bp, Homo sapiens
  source 1..14: mol_type = genomic DNA
cccccccccccccc

SEQ ID NO: 1447 - DNA, 14 bp, Homo sapiens
  source 1..14: mol_type = genomic DNA
cccccccccccccc

SEQ ID NO: 1448 - DNA, 13 bp, Homo sapiens
  source 1..13: mol_type = genomic DNA
ccccccccccccc

SEQ ID NO: 1449 - DNA, 12 bp, Homo sapiens
  source 1..12: mol_type = genomic DNA
cccccccccccc

SEQ ID NO: 1450 - DNA, 12 bp, Homo sapiens
  source 1..12: mol_type = genomic DNA
cccccccccccc

SEQ ID NO: 1451 - DNA, 13 bp, Homo sapiens
  source 1..13: mol_type = genomic DNA
ccccccccccccc

SEQ ID NO: 1452 - DNA, 14 bp, Homo sapiens
  source 1..14: mol_type = genomic DNA
cccccccccccccc

SEQ ID NO: 1453 - DNA, 14 bp, Homo sapiens
  source 1..14: mol_type = genomic DNA
cccccccccccccc

SEQ ID NO: 1454 - DNA, 16 bp, Homo sapiens
  source 1..16: mol_type = genomic DNA
cccccccccccccccc

SEQ ID NO: 1455 - DNA, 13 bp, Homo sapiens
  source 1..13: mol_type = genomic DNA
ccccccccccccc

SEQ ID NO: 1456 - DNA, 13 bp, Homo sapiens
  source 1..13: mol_type = genomic DNA
ccccccccccccc

SEQ ID NO: 1457 - DNA, 12 bp, Homo sapiens
  source 1..12: mol_type = genomic DNA
cccccccccccc

SEQ ID NO: 1458 - DNA, 12 bp, Homo sapiens
  source 1..12: mol_type = genomic DNA
cccccccccccc

SEQ ID NO: 1459 - DNA, 14 bp, Homo sapiens
  source 1..14: mol_type = genomic DNA
cccccccccccccc

SEQ ID NO: 1460 - DNA, 15 bp, Homo sapiens
  source 1..15: mol_type = genomic DNA
ccccccccccccccc

SEQ ID NO: 1461 - DNA, 12 bp, Homo sapiens
  source 1..12: mol_type = genomic DNA
cccccccccccc

SEQ ID NO: 1462 - DNA, 12 bp, Homo sapiens
  source 1..12: mol_type = genomic DNA
cccccccccccc

SEQ ID NO: 1463 - DNA, 15 bp, Homo sapiens
  source 1..15: mol_type = genomic DNA
ccccccccccccccc

SEQ ID NO: 1464 - DNA, 12 bp, Homo sapiens
  source 1..12: mol_type = genomic DNA
cccccccccccc

SEQ ID NO: 1465 - DNA, 13 bp, Homo sapiens
  source 1..13: mol_type = genomic DNA
ccccccccccccc

SEQ ID NO: 1466 - DNA, 12 bp, Homo sapiens
  source 1..12: mol_type = genomic DNA
cccccccccccc

SEQ ID NO: 1467 - DNA, 17 bp, Homo sapiens
  source 1..17: mol_type = genomic DNA
ccccccccccccccccc

SEQ ID NO: 1468 - DNA, 14 bp, Homo sapiens
  source 1..14: mol_type = genomic DNA
cccccccccccccc

SEQ ID NO: 1469 - DNA, 14 bp, Homo sapiens
  source 1..14: mol_type = genomic DNA
cccccccccccccc

SEQ ID NO: 1470 - DNA, 13 bp, Homo sapiens
  source 1..13: mol_type = genomic DNA
ccccccccccccc

SEQ ID NO: 1471 - DNA, 12 bp, Homo sapiens
  source 1..12: mol_type = genomic DNA
cccccccccccc

SEQ ID NO: 1472 - DNA, 12 bp, Homo sapiens
  source 1..12: mol_type = genomic DNA
cccccccccccc

SEQ ID NO: 1473 - DNA, 13 bp, Homo sapiens
  source 1..13: mol_type = genomic DNA
ccccccccccccc

SEQ ID NO: 1474 - DNA, 12 bp, Homo sapiens
  source 1..12: mol_type = genomic DNA
cccccccccccc

SEQ ID NO: 1475 - DNA, 12 bp, Homo sapiens
  source 1..12: mol_type = genomic DNA
cccccccccccc

SEQ ID NO: 1476 - DNA, 15 bp, Homo sapiens
  source 1..15: mol_type = genomic DNA
ccccccccccccccc

SEQ ID NO: 1477 - DNA, 14 bp, Homo sapiens
  source 1..14: mol_type = genomic DNA
cccccccccccccc

SEQ ID NO: 1478 - DNA, 12 bp, Homo sapiens
  source 1..12: mol_type = genomic DNA
cccccccccccc

SEQ ID NO: 1479 - DNA, 14 bp, Homo sapiens
  source 1..14: mol_type = genomic DNA
cccccccccccccc

SEQ ID NO: 1480 - DNA, 17 bp, Homo sapiens
  source 1..17: mol_type = genomic DNA
ccccccccccccccccc

SEQ ID NO: 1481 - DNA, 12 bp, Homo sapiens
  source 1..12: mol_type = genomic DNA
cccccccccccc

SEQ ID NO: 1482 - DNA, 15 bp, Homo sapiens
  source 1..15: mol_type = genomic DNA
ccccccccccccccc

SEQ ID NO: 1483 - DNA, 13 bp, Homo sapiens
  source 1..13: mol_type = genomic DNA
ccccccccccccc

SEQ ID NO: 1484 - DNA, 15 bp, Homo sapiens
  source 1..15: mol_type = genomic DNA
ccccccccccccccc

SEQ ID NO: 1485 - DNA, 18 bp, Homo sapiens
  source 1..18: mol_type = genomic DNA
cccccccccccccccccc

SEQ ID NO: 1486 - DNA, 14 bp, Homo sapiens
  source 1..14: mol_type = genomic DNA
cccccccccccccc

SEQ ID NO: 1487 - DNA, 15 bp, Homo sapiens
  source 1..15: mol_type = genomic DNA
ccccccccccccccc

SEQ ID NO: 1488 - DNA, 14 bp, Homo sapiens
  source 1..14: mol_type = genomic DNA
cccccccccccccc

SEQ ID NO: 1489 - DNA, 13 bp, Homo sapiens
  source 1..13: mol_type = genomic DNA
ccccccccccccc

SEQ ID NO: 1490 - DNA, 15 bp, Homo sapiens
  source 1..15: mol_type = genomic DNA
ccccccccccccccc

SEQ ID NO: 1491 - DNA, 13 bp, Homo sapiens
  source 1..13: mol_type = genomic DNA
ccccccccccccc

SEQ ID NO: 1492 - DNA, 15 bp, Homo sapiens
  source 1..15: mol_type = genomic DNA
ccccccccccccccc

SEQ ID NO: 1493 - DNA, 13 bp, Homo sapiens
  source 1..13: mol_type = genomic DNA
ccccccccccccc

SEQ ID NO: 1494 - DNA, 16 bp, Homo sapiens
  source 1..16: mol_type = genomic DNA
cccccccccccccccc

SEQ ID NO: 1495 - DNA, 16 bp, Homo sapiens
  source 1..16: mol_type = genomic DNA
cccccccccccccccc

SEQ ID NO: 1496 - DNA, 18 bp, Homo sapiens
  source 1..18: mol_type = genomic DNA
cccccccccccccccccc

SEQ ID NO: 1497 - DNA, 14 bp, Homo sapiens
  source 1..14: mol_type = genomic DNA
cccccccccccccc

SEQ ID NO: 1498 - DNA, 13 bp, Homo sapiens
  source 1..13: mol_type = genomic DNA
ccccccccccccc

SEQ ID NO: 1499 - DNA, 17 bp, Homo sapiens
  source 1..17: mol_type = genomic DNA
ccccccccccccccccc

SEQ ID NO: 1500 - DNA, 12 bp, Homo sapiens
  source 1..12: mol_type = genomic DNA
cccccccccccc

SEQ ID NO: 1501 - DNA, 29 bp, Homo sapiens
  source 1..29: mol_type = genomic DNA
ccccccccccccccccccccccccccccc

SEQ ID NO: 1502 - DNA, 14 bp, Homo sapiens
  source 1..14: mol_type = genomic DNA
cccccccccccccc

SEQ ID NO: 1503 - DNA, 14 bp, Homo sapiens
  source 1..14: mol_type = genomic DNA
cccccccccccccc

SEQ ID NO: 1504 - DNA, 13 bp, Homo sapiens
  source 1..13: mol_type = genomic DNA
ccccccccccccc

SEQ ID NO: 1505 - DNA, 19 bp, Homo sapiens
  source 1..19: mol_type = genomic DNA
ccccccccccccccccccc

SEQ ID NO: 1506 - DNA, 12 bp, Homo sapiens
  source 1..12: mol_type = genomic DNA
cccccccccccc

SEQ ID NO: 1507 - DNA, 12 bp, Homo sapiens
  source 1..12: mol_type = genomic DNA
cccccccccccc

SEQ ID NO: 1508 - DNA, 13 bp, Homo sapiens
  source 1..13: mol_type = genomic DNA
ccccccccccccc

SEQ ID NO: 1509 - DNA, 17 bp, Homo sapiens
  source 1..17: mol_type = genomic DNA
ccccccccccccccccc

SEQ ID NO: 1510 - DNA, 15 bp, Homo sapiens
  source 1..15: mol_type = genomic DNA
ccccccccccccccc

SEQ ID NO: 1511 - DNA, 12 bp, Homo sapiens
  source 1..12: mol_type = genomic DNA
cccccccccccc

SEQ ID NO: 1512 - DNA, 13 bp, Homo sapiens
  source 1..13: mol_type = genomic DNA
ccccccccccccc

SEQ ID NO: 1513 - DNA, 14 bp, Homo sapiens
  source 1..14: mol_type = genomic DNA
cccccccccccccc

SEQ ID NO: 1514 - DNA, 13 bp, Homo sapiens
  source 1..13: mol_type = genomic DNA
ccccccccccccc

SEQ ID NO: 1515 - DNA, 14 bp, Homo sapiens
  source 1..14: mol_type = genomic DNA
cccccccccccccc

SEQ ID NO: 1516 - DNA, 12 bp, Homo sapiens
  source 1..12: mol_type = genomic DNA
cccccccccccc

SEQ ID NO: 1517 - DNA, 12 bp, Homo sapiens
  source 1..12: mol_type = genomic DNA
cccccccccccc

SEQ ID NO: 1518 - DNA, 12 bp, Homo sapiens
  source 1..12: mol_type = genomic DNA
cccccccccccc

SEQ ID NO: 1519 - DNA, 16 bp, Homo sapiens
  source 1..16: mol_type = genomic DNA
cccccccccccccccc

SEQ ID NO: 1520 - DNA, 12 bp, Homo sapiens
  source 1..12: mol_type = genomic DNA
cccccccccccc

SEQ ID NO: 1521 - DNA, 13 bp, Homo sapiens
  source 1..13: mol_type = genomic DNA
ccccccccccccc

SEQ ID NO: 1522 - DNA, 13 bp, Homo sapiens
  source 1..13: mol_type = genomic DNA
ccccccccccccc

SEQ ID NO: 1523 - DNA, 12 bp, Homo sapiens
  source 1..12: mol_type = genomic DNA
cccccccccccc

SEQ ID NO: 1524 - DNA, 21 bp, Homo sapiens
  source 1..21: mol_type = genomic DNA
ccccccccccccccccccccc

SEQ ID NO: 1525 - DNA, 12 bp, Homo sapiens
  source 1..12: mol_type = genomic DNA
cccccccccccc

SEQ ID NO: 1526 - DNA, 14 bp, Homo sapiens
  source 1..14: mol_type = genomic DNA
cccccccccccccc

SEQ ID NO: 1527 - DNA, 12 bp, Homo sapiens
  source 1..12: mol_type = genomic DNA
cccccccccccc

SEQ ID NO: 1528 - DNA, 13 bp, Homo sapiens
  source 1..13: mol_type = genomic DNA
ccccccccccccc

SEQ ID NO: 1529 - DNA, 13 bp, Homo sapiens
  source 1..13: mol_type = genomic DNA
ccccccccccccc

SEQ ID NO: 1530 - DNA, 13 bp, Homo sapiens
  source 1..13: mol_type = genomic DNA
ccccccccccccc

SEQ ID NO: 1531 - DNA, 12 bp, Homo sapiens
  source 1..12: mol_type = genomic DNA
cccccccccccc

SEQ ID NO: 1532 - DNA, 12 bp, Homo sapiens
  source 1..12: mol_type = genomic DNA
cccccccccccc

SEQ ID NO: 1533 - DNA, 13 bp, Homo sapiens
  source 1..13: mol_type = genomic DNA
ccccccccccccc

SEQ ID NO: 1534 - DNA, 12 bp, Homo sapiens
  source 1..12: mol_type = genomic DNA
cccccccccccc

SEQ ID NO: 1535 - DNA, 12 bp, Homo sapiens
  source 1..12: mol_type = genomic DNA
cccccccccccc

SEQ ID NO: 1536 - DNA, 13 bp, Homo sapiens
  source 1..13: mol_type = genomic DNA
ccccccccccccc

SEQ ID NO: 1537 - DNA, 15 bp, Homo sapiens
  source 1..15: mol_type = genomic DNA
ccccccccccccccc

SEQ ID NO: 1538 - DNA, 12 bp, Homo sapiens
  source 1..12: mol_type = genomic DNA
cccccccccccc

SEQ ID NO: 1539 - DNA, 13 bp, Homo sapiens
  source 1..13: mol_type = genomic DNA
ccccccccccccc

SEQ ID NO: 1540 - DNA, 12 bp, Homo sapiens
  source 1..12: mol_type = genomic DNA
cccccccccccc

SEQ ID NO: 1541 - DNA, 12 bp, Homo sapiens
  source 1..12: mol_type = genomic DNA
cccccccccccc

SEQ ID NO: 1542 - DNA, 13 bp, Homo sapiens
  source 1..13: mol_type = genomic DNA
ccccccccccccc

SEQ ID NO: 1543 - DNA, 12 bp, Homo sapiens
  source 1..12: mol_type = genomic DNA
cccccccccccc

SEQ ID NO: 1544 - DNA, 14 bp, Homo sapiens
  source 1..14: mol_type = genomic DNA
cccccccccccccc

SEQ ID NO: 1545 - DNA, 12 bp, Homo sapiens
  source 1..12: mol_type = genomic DNA
cccccccccccc

SEQ ID NO: 1546 - DNA, 13 bp, Homo sapiens
  source 1..13: mol_type = genomic DNA
ccccccccccccc

SEQ ID NO: 1547 - DNA, 12 bp, Homo sapiens
  source 1..12: mol_type = genomic DNA
cccccccccccc

SEQ ID NO: 1548 - DNA, 13 bp, Homo sapiens
  source 1..13: mol_type = genomic DNA
ccccccccccccc

SEQ ID NO: 1549 - DNA, 16 bp, Homo sapiens
  source 1..16: mol_type = genomic DNA
cccccccccccccccc

SEQ ID NO: 1550 - DNA, 12 bp, Homo sapiens
  source 1..12: mol_type = genomic DNA
cccccccccccc

SEQ ID NO: 1551 - DNA, 15 bp, Homo sapiens
  source 1..15: mol_type = genomic DNA
ccccccccccccccc

SEQ ID NO: 1552 - DNA, 14 bp, Homo sapiens
  source 1..14: mol_type = genomic DNA
cccccccccccccc

SEQ ID NO: 1553 - DNA, 13 bp, Homo sapiens
  source 1..13: mol_type = genomic DNA
ccccccccccccc

SEQ ID NO: 1554 - DNA, 15 bp, Homo sapiens
  source 1..15: mol_type = genomic DNA
ccccccccccccccc

SEQ ID NO: 1555 - DNA, 12 bp, Homo sapiens
  source 1..12: mol_type = genomic DNA
cccccccccccc

SEQ ID NO: 1556 - DNA, 15 bp, Homo sapiens
  source 1..15: mol_type = genomic DNA
ccccccccccccccc

SEQ ID NO: 1557 - DNA, 13 bp, Homo sapiens
  source 1..13: mol_type = genomic DNA
ccccccccccccc

SEQ ID NO: 1558 - DNA, 20 bp, Homo sapiens
  source 1..20: mol_type = genomic DNA
cccccccccccccccccccc

SEQ ID NO: 1559 - DNA, 15 bp, Homo sapiens
  source 1..15: mol_type = genomic DNA
ccccccccccccccc

SEQ ID NO: 1560 - DNA, 12 bp, Homo sapiens
  source 1..12: mol_type = genomic DNA
cccccccccccc

SEQ ID NO: 1561 - DNA, 12 bp, Homo sapiens
  source 1..12: mol_type = genomic DNA
cccccccccccc

SEQ ID NO: 1562 - DNA, 14 bp, Homo sapiens
  source 1..14: mol_type = genomic DNA
cccccccccccccc

SEQ ID NO: 1563 - DNA, 12 bp, Homo sapiens
  source 1..12: mol_type = genomic DNA
cccccccccccc

SEQ ID NO: 1564 - DNA, 12 bp, Homo sapiens
  source 1..12: mol_type = genomic DNA
cccccccccccc

SEQ ID NO: 1565 - DNA, 12 bp, Homo sapiens
  source 1..12: mol_type = genomic DNA
cccccccccccc

SEQ ID NO: 1566 - DNA, 13 bp, Homo sapiens
  source 1..13: mol_type = genomic DNA
ccccccccccccc

SEQ ID NO: 1567 - DNA, 12 bp, Homo sapiens
  source 1..12: mol_type = genomic DNA
cccccccccccc

SEQ ID NO: 1568 - DNA, 16 bp, Homo sapiens
  source 1..16: mol_type = genomic DNA
cccccccccccccccc

SEQ ID NO: 1569 - DNA, 12 bp, Homo sapiens
  source 1..12: mol_type = genomic DNA
cccccccccccc

SEQ ID NO: 1570 - DNA, 12 bp, Homo sapiens
  source 1..12: mol_type = genomic DNA
cccccccccccc

SEQ ID NO: 1571 - DNA, 14 bp, Homo sapiens
  source 1..14: mol_type = genomic DNA
cccccccccccccc

SEQ ID NO: 1572 - DNA, 22 bp, Homo sapiens
  source 1..22: mol_type = genomic DNA
cccccccccccccccccccccc

SEQ ID NO: 1573 - DNA, 15 bp, Homo sapiens
  source 1..15: mol_type = genomic DNA
ccccccccccccccc

SEQ ID NO: 1574 - DNA, 17 bp, Homo sapiens
  source 1..17: mol_type = genomic DNA
ccccccccccccccccc

SEQ ID NO: 1575 - DNA, 13 bp, Homo sapiens
  source 1..13: mol_type = genomic DNA
ccccccccccccc

SEQ ID NO: 1576 - DNA, 12 bp, Homo sapiens
  source 1..12: mol_type = genomic DNA
cccccccccccc

SEQ ID NO: 1577 - DNA, 15 bp, Homo sapiens
  source 1..15: mol_type = genomic DNA
ccccccccccccccc

SEQ ID NO: 1578 - DNA, 12 bp, Homo sapiens
  source 1..12: mol_type = genomic DNA
cccccccccccc

SEQ ID NO: 1579 - DNA, 16 bp, Homo sapiens
  source 1..16: mol_type = genomic DNA
cccccccccccccccc

SEQ ID NO: 1580 - DNA, 12 bp, Homo sapiens
  source 1..12: mol_type = genomic DNA
cccccccccccc

SEQ ID NO: 1581 - DNA, 17 bp, Homo sapiens
  source 1..17: mol_type = genomic DNA
ccccccccccccccccc

SEQ ID NO: 1582 - DNA, 13 bp, Homo sapiens
  source 1..13: mol_type = genomic DNA
ccccccccccccc

SEQ ID NO: 1583 - DNA, 13 bp, Homo sapiens
  source 1..13: mol_type = genomic DNA
ccccccccccccc

SEQ ID NO: 1584 - DNA, 12 bp, Homo sapiens
  source 1..12: mol_type = genomic DNA
cccccccccccc

SEQ ID NO: 1585 - DNA, 12 bp, Homo sapiens
  source 1..12: mol_type = genomic DNA
cccccccccccc

SEQ ID NO: 1586 - DNA, 14 bp, Homo sapiens
  source 1..14: mol_type = genomic DNA
cccccccccccccc

SEQ ID NO: 1587 - DNA, 14 bp, Homo sapiens
  source 1..14: mol_type = genomic DNA
cccccccccccccc

SEQ ID NO: 1588 - DNA, 12 bp, Homo sapiens
  source 1..12: mol_type = genomic DNA
cccccccccccc

SEQ ID NO: 1589 - DNA, 12 bp, Homo sapiens
  source 1..12: mol_type = genomic DNA
cccccccccccc

SEQ ID NO: 1590 - DNA, 12 bp, Homo sapiens
  source 1..12: mol_type = genomic DNA
cccccccccccc

SEQ ID NO: 1591 - DNA, 13 bp, Homo sapiens
  source 1..13: mol_type = genomic DNA
ccccccccccccc

SEQ ID NO: 1592 - DNA, 12 bp, Homo sapiens
  source 1..12: mol_type = genomic DNA
cccccccccccc

SEQ ID NO: 1593 - DNA, 15 bp, Homo sapiens
  source 1..15: mol_type = genomic DNA
ccccccccccccccc

SEQ ID NO: 1594 - DNA, 12 bp, Homo sapiens
  source 1..12: mol_type = genomic DNA
cccccccccccc

SEQ ID NO: 1595 - DNA, 12 bp, Homo sapiens
  source 1..12: mol_type = genomic DNA
cccccccccccc

SEQ ID NO: 1596 - DNA, 12 bp, Homo sapiens
  source 1..12: mol_type = genomic DNA
cccccccccccc

SEQ ID NO: 1597 - DNA, 13 bp, Homo sapiens
  source 1..13: mol_type = genomic DNA
ccccccccccccc

SEQ ID NO: 1598 - DNA, 14 bp, Homo sapiens
  source 1..14: mol_type = genomic DNA
cccccccccccccc

SEQ ID NO: 1599 - DNA, 15 bp, Homo sapiens
  source 1..15: mol_type = genomic DNA
ccccccccccccccc

SEQ ID NO: 1600 - DNA, 12 bp, Homo sapiens
  source 1..12: mol_type = genomic DNA
cccccccccccc

SEQ ID NO: 1601 - DNA, 14 bp, Homo sapiens
  source 1..14: mol_type = genomic DNA
cccccccccccccc

SEQ ID NO: 1602 - DNA, 15 bp, Homo sapiens
  source 1..15: mol_type = genomic DNA
ccccccccccccccc

SEQ ID NO: 1603 - DNA, 12 bp, Homo sapiens
  source 1..12: mol_type = genomic DNA
cccccccccccc

SEQ ID NO: 1604 - DNA, 12 bp, Homo sapiens
  source 1..12: mol_type = genomic DNA
cccccccccccc

SEQ ID NO: 1605 - DNA, 12 bp, Homo sapiens
  source 1..12: mol_type = genomic DNA
cccccccccccc

SEQ ID NO: 1606 - DNA, 14 bp, Homo sapiens
  source 1..14: mol_type = genomic DNA
cccccccccccccc

SEQ ID NO: 1607 - DNA, 12 bp, Homo sapiens
  source 1..12: mol_type = genomic DNA
cccccccccccc

SEQ ID NO: 1608 - DNA, 15 bp, Homo sapiens
  source 1..15: mol_type = genomic DNA
ccccccccccccccc

SEQ ID NO: 1609 - DNA, 14 bp, Homo sapiens
  source 1..14: mol_type = genomic DNA
cccccccccccccc

SEQ ID NO: 1610 - DNA, 13 bp, Homo sapiens
  source 1..13: mol_type = genomic DNA
ccccccccccccc

SEQ ID NO: 1611 - DNA, 13 bp, Homo sapiens
  source 1..13: mol_type = genomic DNA
ccccccccccccc

SEQ ID NO: 1612 - DNA, 13 bp, Homo sapiens
  source 1..13: mol_type = genomic DNA
ccccccccccccc

SEQ ID NO: 1613 - DNA, 12 bp, Homo sapiens
  source 1..12: mol_type = genomic DNA
cccccccccccc

SEQ ID NO: 1614 - DNA, 12 bp, Homo sapiens
  source 1..12: mol_type = genomic DNA
cccccccccccc

SEQ ID NO: 1615 - DNA, 12 bp, Homo sapiens
  source 1..12: mol_type = genomic DNA
cccccccccccc

SEQ ID NO: 1616 - DNA, 12 bp, Homo sapiens
  source 1..12: mol_type = genomic DNA
cccccccccccc

SEQ ID NO: 1617 - DNA, 12 bp, Homo sapiens
  source 1..12: mol_type = genomic DNA
cccccccccccc

SEQ ID NO: 1618 - DNA, 13 bp, Homo sapiens
  source 1..13: mol_type = genomic DNA
ccccccccccccc

SEQ ID NO: 1619 - DNA, 14 bp, Homo sapiens
  source 1..14: mol_type = genomic DNA
cccccccccccccc

SEQ ID NO: 1620 - DNA, 15 bp, Homo sapiens
  source 1..15: mol_type = genomic DNA
ccccccccccccccc

SEQ ID NO: 1621 - DNA, 13 bp, Homo sapiens
  source 1..13: mol_type = genomic DNA
ccccccccccccc

SEQ ID NO: 1622 - DNA, 15 bp, Homo sapiens
  source 1..15: mol_type = genomic DNA
ccccccccccccccc

SEQ ID NO: 1623 - DNA, 13 bp, Homo sapiens
  source 1..13: mol_type = genomic DNA
ccccccccccccc

SEQ ID NO: 1624 - DNA, 13 bp, Homo sapiens
  source 1..13: mol_type = genomic DNA
ccccccccccccc

SEQ ID NO: 1625 - DNA, 12 bp, Homo sapiens
  source 1..12: mol_type = genomic DNA
cccccccccccc

SEQ ID NO: 1626 - DNA, 14 bp, Homo sapiens
  source 1..14: mol_type = genomic DNA
cccccccccccccc

SEQ ID NO: 1627 - DNA, 12 bp, Homo sapiens
  source 1..12: mol_type = genomic DNA
cccccccccccc

SEQ ID NO: 1628 - DNA, 13 bp, Homo sapiens
  source 1..13: mol_type = genomic DNA
ccccccccccccc

SEQ ID NO: 1629 - DNA, 12 bp, Homo sapiens
  source 1..12: mol_type = genomic DNA
cccccccccccc

SEQ ID NO: 1630 - DNA, 15 bp, Homo sapiens
  source 1..15: mol_type = genomic DNA
ccccccccccccccc

SEQ ID NO: 1631 - DNA, 12 bp, Homo sapiens
  source 1..12: mol_type = genomic DNA
cccccccccccc

SEQ ID NO: 1632 - DNA, 12 bp, Homo sapiens
  source 1..12: mol_type = genomic DNA
cccccccccccc

SEQ ID NO: 1633 - DNA, 17 bp, Homo sapiens
  source 1..17: mol_type = genomic DNA
ccccccccccccccccc

SEQ ID NO: 1634 - DNA, 12 bp, Homo sapiens
  source 1..12: mol_type = genomic DNA
cccccccccccc

SEQ ID NO: 1635 - DNA, 12 bp, Homo sapiens
  source 1..12: mol_type = genomic DNA
cccccccccccc

SEQ ID NO: 1636 - DNA, 14 bp, Homo sapiens
  source 1..14: mol_type = genomic DNA
cccccccccccccc

SEQ ID NO: 1637 - DNA, 15 bp, Homo sapiens
  source 1..15: mol_type = genomic DNA
ccccccccccccccc

SEQ ID NO: 1638 - DNA, 13 bp, Homo sapiens
  source 1..13: mol_type = genomic DNA
ccccccccccccc

SEQ ID NO: 1639 - DNA, 14 bp, Homo sapiens
  source 1..14: mol_type = genomic DNA
cccccccccccccc

SEQ ID NO: 1640 - DNA, 12 bp, Homo sapiens
  source 1..12: mol_type = genomic DNA
cccccccccccc

SEQ ID NO: 1641 - DNA, 14 bp, Homo sapiens
  source 1..14: mol_type = genomic DNA
cccccccccccccc

SEQ ID NO: 1642 - DNA, 16 bp, Homo sapiens
  source 1..16: mol_type = genomic DNA
cccccccccccccccc

SEQ ID NO: 1643 - DNA, 12 bp, Homo sapiens
  source 1..12: mol_type = genomic DNA
cccccccccccc

SEQ ID NO: 1644 - DNA, 14 bp, Homo sapiens
  source 1..14: mol_type = genomic DNA
cccccccccccccc

SEQ ID NO: 1645 - DNA, 13 bp, Homo sapiens
  source 1..13: mol_type = genomic DNA
ccccccccccccc

SEQ ID NO: 1646 - DNA, 16 bp, Homo sapiens
  source 1..16: mol_type = genomic DNA
cccccccccccccccc

SEQ ID NO: 1647 - DNA, 13 bp, Homo sapiens
  source 1..13: mol_type = genomic DNA
ccccccccccccc

SEQ ID NO: 1648 - DNA, 15 bp, Homo sapiens
  source 1..15: mol_type = genomic DNA
ccccccccccccccc

SEQ ID NO: 1649 - DNA, 12 bp, Homo sapiens
  source 1..12: mol_type = genomic DNA
cccccccccccc

SEQ ID NO: 1650 - DNA, 12 bp, Homo sapiens
  source 1..12: mol_type = genomic DNA
cccccccccccc

SEQ ID NO: 1651 - DNA, 19 bp, Homo sapiens
  source 1..19: mol_type = genomic DNA
ccccccccccccccccccc

SEQ ID NO: 1652 - DNA, 17 bp, Homo sapiens
  source 1..17: mol_type = genomic DNA
ccccccccccccccccc

SEQ ID NO: 1653 - DNA, 12 bp, Homo sapiens
  source 1..12: mol_type = genomic DNA
cccccccccccc

SEQ ID NO: 1654 - DNA, 12 bp, Homo sapiens
  source 1..12: mol_type = genomic DNA
cccccccccccc

SEQ ID NO: 1655 - DNA, 13 bp, Homo sapiens
  source 1..13: mol_type = genomic DNA
ccccccccccccc

SEQ ID NO: 1656 - DNA, 12 bp, Homo sapiens
  source 1..12: mol_type = genomic DNA
cccccccccccc

SEQ ID NO: 1657 - DNA, 16 bp, Homo sapiens
  source 1..16: mol_type = genomic DNA
cccccccccccccccc

SEQ ID NO: 1658 - DNA, 13 bp, Homo sapiens
  source 1..13: mol_type = genomic DNA
ccccccccccccc

SEQ ID NO: 1659 - DNA, 15 bp, Homo sapiens
  source 1..15: mol_type = genomic DNA
ccccccccccccccc

SEQ ID NO: 1660 - DNA, 15 bp, Homo sapiens
  source 1..15: mol_type = genomic DNA
ccccccccccccccc

SEQ ID NO: 1661 - DNA, 13 bp, Homo sapiens
  source 1..13: mol_type = genomic DNA
ccccccccccccc

SEQ ID NO: 1662 - DNA, 12 bp, Homo sapiens
  source 1..12: mol_type = genomic DNA
cccccccccccc

SEQ ID NO: 1663 - DNA, 14 bp, Homo sapiens
  source 1..14: mol_type = genomic DNA
cccccccccccccc

SEQ ID NO: 1664 - DNA, 14 bp, Homo sapiens
  source 1..14: mol_type = genomic DNA
cccccccccccccc

SEQ ID NO: 1665 - DNA, 15 bp, Homo sapiens
  source 1..15: mol_type = genomic DNA
ccccccccccccccc

SEQ ID NO: 1666 - DNA, 17 bp, Homo sapiens
  source 1..17: mol_type = genomic DNA
ccccccccccccccccc

SEQ ID NO: 1667 - DNA, 12 bp, Homo sapiens
  source 1..12: mol_type = genomic DNA
cccccccccccc

SEQ ID NO: 1668 - DNA, 14 bp, Homo sapiens
  source 1..14: mol_type = genomic DNA
cccccccccccccc

SEQ ID NO: 1669 - DNA, 12 bp, Homo sapiens
  source 1..12: mol_type = genomic DNA
cccccccccccc

SEQ ID NO: 1670 - DNA, 21 bp, Homo sapiens
  source 1..21: mol_type = genomic DNA
ccccccccccccccccccccc

SEQ ID NO: 1671 - DNA, 12 bp, Homo sapiens
  source 1..12: mol_type = genomic DNA
cccccccccccc

SEQ ID NO: 1672 - DNA, 13 bp, Homo sapiens
  source 1..13: mol_type = genomic DNA
ccccccccccccc

SEQ ID NO: 1673 - DNA, 13 bp, Homo sapiens
  source 1..13: mol_type = genomic DNA
ccccccccccccc

SEQ ID NO: 1674 - DNA, 14 bp, Homo sapiens
  source 1..14: mol_type = genomic DNA
cccccccccccccc

SEQ ID NO: 1675 - DNA, 13 bp, Homo sapiens
  source 1..13: mol_type = genomic DNA
ccccccccccccc

SEQ ID NO: 1676 - DNA, 14 bp, Homo sapiens
  source 1..14: mol_type = genomic DNA
cccccccccccccc

SEQ ID NO: 1677 - DNA, 12 bp, Homo sapiens
  source 1..12: mol_type = genomic DNA
cccccccccccc

SEQ ID NO: 1678 - DNA, 19 bp, Homo sapiens
  source 1..19: mol_type = genomic DNA
ccccccccccccccccccc

SEQ ID NO: 1679 - DNA, 12 bp, Homo sapiens
  source 1..12: mol_type = genomic DNA
cccccccccccc

SEQ ID NO: 1680 - DNA, 12 bp, Homo sapiens
  source 1..12: mol_type = genomic DNA
cccccccccccc

SEQ ID NO: 1681 - DNA, 13 bp, Homo sapiens
  source 1..13: mol_type = genomic DNA
ccccccccccccc

SEQ ID NO: 1682 - DNA, 29 bp, Homo sapiens
  source 1..29: mol_type = genomic DNA
ccccccccccccccccccccccccccccc

SEQ ID NO: 1683 - DNA, 12 bp, Homo sapiens
  source 1..12: mol_type = genomic DNA
cccccccccccc

SEQ ID NO: 1684 - DNA, 13 bp, Homo sapiens
  source 1..13: mol_type = genomic DNA
ccccccccccccc

SEQ ID NO: 1685 - DNA, 16 bp, Homo sapiens
  source 1..16: mol_type = genomic DNA
cccccccccccccccc

SEQ ID NO: 1686 - DNA, 13 bp, Homo sapiens
  source 1..13: mol_type = genomic DNA
ccccccccccccc

SEQ ID NO: 1687 - DNA, 12 bp, Homo sapiens
  source 1..12: mol_type = genomic DNA
cccccccccccc

SEQ ID NO: 1688 - DNA, 18 bp, Homo sapiens
  source 1..18: mol_type = genomic DNA
cccccccccccccccccc

SEQ ID NO: 1689 - DNA, 12 bp, Homo sapiens
  source 1..12: mol_type = genomic DNA
cccccccccccc

SEQ ID NO: 1690 - DNA, 14 bp, Homo sapiens
  source 1..14: mol_type = genomic DNA
cccccccccccccc

SEQ ID NO: 1691 - DNA, 14 bp, Homo sapiens
  source 1..14: mol_type = genomic DNA
cccccccccccccc

SEQ ID NO: 1692 - DNA, 14 bp, Homo sapiens
  source 1..14: mol_type = genomic DNA
cccccccccccccc

SEQ ID NO: 1693 - DNA, 14 bp, Homo sapiens
  source 1..14: mol_type = genomic DNA
cccccccccccccc

SEQ ID NO: 1694 - DNA, 16 bp, Homo sapiens
  source 1..16: mol_type = genomic DNA
cccccccccccccccc

SEQ ID NO: 1695 - DNA, 12 bp, Homo sapiens
  source 1..12: mol_type = genomic DNA
cccccccccccc

SEQ ID NO: 1696 - DNA, 15 bp, Homo sapiens
  source 1..15: mol_type = genomic DNA
ccccccccccccccc

SEQ ID NO: 1697 - DNA, 12 bp, Homo sapiens
  source 1..12: mol_type = genomic DNA
cccccccccccc

SEQ ID NO: 1698 - DNA, 13 bp, Homo sapiens
  source 1..13: mol_type = genomic DNA
ccccccccccccc

SEQ ID NO: 1699 - DNA, 12 bp, Homo sapiens
  source 1..12: mol_type = genomic DNA
cccccccccccc

SEQ ID NO: 1700 - DNA, 13 bp, Homo sapiens
  source 1..13: mol_type = genomic DNA
ccccccccccccc

SEQ ID NO: 1701 - DNA, 20 bp, Homo sapiens
  source 1..20: mol_type = genomic DNA
cccccccccccccccccccc

SEQ ID NO: 1702 - DNA, 12 bp, Homo sapiens
  source 1..12: mol_type = genomic DNA
cccccccccccc

SEQ ID NO: 1703 - DNA, 12 bp, Homo sapiens
  source 1..12: mol_type = genomic DNA
cccccccccccc

SEQ ID NO: 1704 - DNA, 12 bp, Homo sapiens
  source 1..12: mol_type = genomic DNA
cccccccccccc

SEQ ID NO: 1705 - DNA, 14 bp, Homo sapiens
  source 1..14: mol_type = genomic DNA
cccccccccccccc

SEQ ID NO: 1706 - DNA, 12 bp, Homo sapiens
  source 1..12: mol_type = genomic DNA
cccccccccccc

SEQ ID NO: 1707 - DNA, 12 bp, Homo sapiens
  source 1..12: mol_type = genomic DNA
cccccccccccc

SEQ ID NO: 1708 - DNA, 15 bp, Homo sapiens
  source 1..15: mol_type = genomic DNA
ccccccccccccccc

SEQ ID NO: 1709 - DNA, 12 bp, Homo sapiens
  source 1..12: mol_type = genomic DNA
cccccccccccc

SEQ ID NO: 1710 - DNA, 13 bp, Homo sapiens
  source 1..13: mol_type = genomic DNA
ccccccccccccc

SEQ ID NO: 1711 - DNA, 14 bp, Homo sapiens
  source 1..14: mol_type = genomic DNA
cccccccccccccc

SEQ ID NO: 1712 - DNA, 16 bp, Homo sapiens
  source 1..16: mol_type = genomic DNA
cccccccccccccccc

SEQ ID NO: 1713 - DNA, 15 bp, Homo sapiens
  source 1..15: mol_type = genomic DNA
ccccccccccccccc

SEQ ID NO: 1714 - DNA, 17 bp, Homo sapiens
  source 1..17: mol_type = genomic DNA
ccccccccccccccccc

SEQ ID NO: 1715 - DNA, 13 bp, Homo sapiens
  source 1..13: mol_type = genomic DNA
ccccccccccccc

SEQ ID NO: 1716 - DNA, 12 bp, Homo sapiens
  source 1..12: mol_type = genomic DNA
cccccccccccc

SEQ ID NO: 1717 - DNA, 12 bp, Homo sapiens
  source 1..12: mol_type = genomic DNA
cccccccccccc

SEQ ID NO: 1718 - DNA, 17 bp, Homo sapiens
  source 1..17: mol_type = genomic DNA
ccccccccccccccccc

SEQ ID NO: 1719 - DNA, 16 bp, Homo sapiens
  source 1..16: mol_type = genomic DNA
cccccccccccccccc

SEQ ID NO: 1720 - DNA, 12 bp, Homo sapiens
  source 1..12: mol_type = genomic DNA
cccccccccccc

SEQ ID NO: 1721 - DNA, 13 bp, Homo sapiens
  source 1..13: mol_type = genomic DNA
ccccccccccccc

SEQ ID NO: 1722 - DNA, 12 bp, Homo sapiens
  source 1..12: mol_type = genomic DNA
cccccccccccc

SEQ ID NO: 1723 - DNA, 12 bp, Homo sapiens
  source 1..12: mol_type = genomic DNA
cccccccccccc

SEQ ID NO: 1724 - DNA, 12 bp, Homo sapiens
  source 1..12: mol_type = genomic DNA
cccccccccccc

SEQ ID NO: 1725 - DNA, 17 bp, Homo sapiens
  source 1..17: mol_type = genomic DNA
ccccccccccccccccc

SEQ ID NO: 1726 - DNA, 17 bp, Homo sapiens
  source 1..17: mol_type = genomic DNA
ccccccccccccccccc

SEQ ID NO: 1727 - DNA, 12 bp, Homo sapiens
  source 1..12: mol_type = genomic DNA
cccccccccccc

SEQ ID NO: 1728 - DNA, 16 bp, Homo sapiens
  source 1..16: mol_type = genomic DNA
cccccccccccccccc

SEQ ID NO: 1729 - DNA, 12 bp, Homo sapiens
  source 1..12: mol_type = genomic DNA
cccccccccccc

SEQ ID NO: 1730 - DNA, 19 bp, Homo sapiens
  source 1..19: mol_type = genomic DNA
ccccccccccccccccccc

SEQ ID NO: 1731 - DNA, 12 bp, Homo sapiens
  source 1..12: mol_type = genomic DNA
cccccccccccc

SEQ ID NO: 1732 - DNA, 19 bp, Homo sapiens
  source 1..19: mol_type = genomic DNA
ccccccccccccccccccc

SEQ ID NO: 1733 - DNA, 13 bp, Homo sapiens
  source 1..13: mol_type = genomic DNA
ccccccccccccc

SEQ ID NO: 1734 - DNA, 13 bp, Homo sapiens
  source 1..13: mol_type = genomic DNA
ccccccccccccc

SEQ ID NO: 1735 - DNA, 15 bp, Homo sapiens
  source 1..15: mol_type = genomic DNA
ccccccccccccccc

SEQ ID NO: 1736 - DNA, 15 bp, Homo sapiens
  source 1..15: mol_type = genomic DNA
ccccccccccccccc

SEQ ID NO: 1737 - DNA, 14 bp, Homo sapiens
  source 1..14: mol_type = genomic DNA
cccccccccccccc

SEQ ID NO: 1738 - DNA, 13 bp, Homo sapiens
  source 1..13: mol_type = genomic DNA
ccccccccccccc

SEQ ID NO: 1739 - DNA, 13 bp, Homo sapiens
  source 1..13: mol_type = genomic DNA
ccccccccccccc

SEQ ID NO: 1740 - DNA, 13 bp, Homo sapiens
  source 1..13: mol_type = genomic DNA
ccccccccccccc

SEQ ID NO: 1741 - DNA, 12 bp, Homo sapiens
  source 1..12: mol_type = genomic DNA
cccccccccccc

SEQ ID NO: 1742 - DNA, 13 bp, Homo sapiens
  source 1..13: mol_type = genomic DNA
ccccccccccccc

SEQ ID NO: 1743 - DNA, 13 bp, Homo sapiens
  source 1..13: mol_type = genomic DNA
ccccccccccccc

SEQ ID NO: 1744 - DNA, 12 bp, Homo sapiens
  source 1..12: mol_type = genomic DNA
cccccccccccc

SEQ ID NO: 1745 - DNA, 15 bp, Homo sapiens
  source 1..15: mol_type = genomic DNA
ccccccccccccccc

SEQ ID NO: 1746 - DNA, 19 bp, Homo sapiens
  source 1..19: mol_type = genomic DNA
ccccccccccccccccccc

SEQ ID NO: 1747 - DNA, 12 bp, Homo sapiens
  source 1..12: mol_type = genomic DNA
cccccccccccc

SEQ ID NO: 1748 - DNA, 15 bp, Homo sapiens
  source 1..15: mol_type = genomic DNA
ccccccccccccccc

SEQ ID NO: 1749 - DNA, 13 bp, Homo sapiens
  source 1..13: mol_type = genomic DNA
ccccccccccccc

SEQ ID NO: 1750 - DNA, 12 bp, Homo sapiens
  source 1..12: mol_type = genomic DNA
ccccccctcccc

SEQ ID NO: 1751 - DNA, 13 bp, Homo sapiens
  source 1..13: mol_type = genomic DNA
ccccccccccccc

SEQ ID NO: 1752 - DNA, 18 bp, Homo sapiens
  source 1..18: mol_type = genomic DNA
cccccccccccccccccc

SEQ ID NO: 1753 - DNA, 19 bp, Homo sapiens
  source 1..19: mol_type = genomic DNA
ccccccccccccccccccc

SEQ ID NO: 1754 - DNA, 14 bp, Homo sapiens
  source 1..14: mol_type = genomic DNA
cccccccccccccc

SEQ ID NO: 1755 - DNA, 12 bp, Homo sapiens
  source 1..12: mol_type = genomic DNA
cccccccccccc

SEQ ID NO: 1756 - DNA, 12 bp, Homo sapiens
  source 1..12: mol_type = genomic DNA
cccccccccccc

SEQ ID NO: 1757 - DNA, 12 bp, Homo sapiens
  source 1..12: mol_type = genomic DNA
cccccccccccc

SEQ ID NO: 1758 - DNA, 12 bp, Homo sapiens
  source 1..12: mol_type = genomic DNA
cccccccccccc

SEQ ID NO: 1759 - DNA, 16 bp, Homo sapiens
  source 1..16: mol_type = genomic DNA
cccccccccccccccc

SEQ ID NO: 1760 - DNA, 12 bp, Homo sapiens
  source 1..12: mol_type = genomic DNA
cccccccccccc

SEQ ID NO: 1761 - DNA, 17 bp, Homo sapiens
  source 1..17: mol_type = genomic DNA
ccccccccccccccccc

SEQ ID NO: 1762 - DNA, 12 bp, Homo sapiens
  source 1..12: mol_type = genomic DNA
cccccccccccc

SEQ ID NO: 1763 - DNA, 12 bp, Homo sapiens
  source 1..12: mol_type = genomic DNA
cccccccccccc

SEQ ID NO: 1764 - DNA, 14 bp, Homo sapiens
  source 1..14: mol_type = genomic DNA
cccccccccccccc

SEQ ID NO: 1765 - DNA, 12 bp, Homo sapiens
  source 1..12: mol_type = genomic DNA
cccccccccccc

SEQ ID NO: 1766 - DNA, 19 bp, Homo sapiens
  source 1..19: mol_type = genomic DNA
ccccccccccccccccccc

SEQ ID NO: 1767 - DNA, 12 bp, Homo sapiens
  source 1..12: mol_type = genomic DNA
cccccccccccc

SEQ ID NO: 1768 - DNA, 13 bp, Homo sapiens
  source 1..13: mol_type = genomic DNA
ccccccccccccc

SEQ ID NO: 1769 - DNA, 14 bp, Homo sapiens
  source 1..14: mol_type = genomic DNA
cccccccccccccc

SEQ ID NO: 1770 - DNA, 14 bp, Homo sapiens
  source 1..14: mol_type = genomic DNA
cccccccccccccc

SEQ ID NO: 1771 - DNA, 12 bp, Homo sapiens
  source 1..12: mol_type = genomic DNA
cccccccccccc

SEQ ID NO: 1772 - DNA, 12 bp, Homo sapiens
  source 1..12: mol_type = genomic DNA
cccccccccccc

SEQ ID NO: 1773 - DNA, 12 bp, Homo sapiens
  source 1..12: mol_type = genomic DNA
cccccccccccc

SEQ ID NO: 1774 - DNA, 13 bp, Homo sapiens
  source 1..13: mol_type = genomic DNA
ccccccccccccc

SEQ ID NO: 1775 - DNA, 12 bp, Homo sapiens
  source 1..12: mol_type = genomic DNA
cccccccccccc

SEQ ID NO: 1776 - DNA, 12 bp, Homo sapiens
  source 1..12: mol_type = genomic DNA
cccccccccccc

SEQ ID NO: 1777 - DNA, 12 bp, Homo sapiens
  source 1..12: mol_type = genomic DNA
cccccccccccc

SEQ ID NO: 1778 - DNA, 12 bp, Homo sapiens
  source 1..12: mol_type = genomic DNA
cccccccccccc

SEQ ID NO: 1779 - DNA, 12 bp, Homo sapiens
  source 1..12: mol_type = genomic DNA
cccccccccccc

SEQ ID NO: 1780 - DNA, 12 bp, Homo sapiens
  source 1..12: mol_type = genomic DNA
cccccccccccc

SEQ ID NO: 1781 - DNA, 12 bp, Homo sapiens
  source 1..12: mol_type = genomic DNA
cccccccccccc

SEQ ID NO: 1782 - DNA, 12 bp, Homo sapiens
  source 1..12: mol_type = genomic DNA
cccccccccccc

SEQ ID NO: 1783 - DNA, 13 bp, Homo sapiens
  source 1..13: mol_type = genomic DNA
ccccccccccccc

SEQ ID NO: 1784 - DNA, 14 bp, Homo sapiens
  source 1..14: mol_type = genomic DNA
cccccccccccccc

SEQ ID NO: 1785 - DNA, 12 bp, Homo sapiens
  source 1..12: mol_type = genomic DNA
cccccccccccc

SEQ ID NO: 1786 - DNA, 14 bp, Homo sapiens
  source 1..14: mol_type = genomic DNA
cccccccccccccc

SEQ ID NO: 1787 - DNA, 14 bp, Homo sapiens
  source 1..14: mol_type = genomic DNA
cccccccccccccc

SEQ ID NO: 1788 - DNA, 13 bp, Homo sapiens
  source 1..13: mol_type = genomic DNA
ccccccccccccc

SEQ ID NO: 1789 - DNA, 12 bp, Homo sapiens
  source 1..12: mol_type = genomic DNA
cccccccccccc

SEQ ID NO: 1790 - DNA, 12 bp, Homo sapiens
  source 1..12: mol_type = genomic DNA
cccccccccccc

SEQ ID NO: 1791 - DNA, 12 bp, Homo sapiens
  source 1..12: mol_type = genomic DNA
cccccccccccc

SEQ ID NO: 1792 - DNA, 14 bp, Homo sapiens
  source 1..14: mol_type = genomic DNA
cccccccccccccc

SEQ ID NO: 1793 - DNA, 14 bp, Homo sapiens
  source 1..14: mol_type = genomic DNA
cccccccccccccc

SEQ ID NO: 1794 - DNA, 14 bp, Homo sapiens
  source 1..14: mol_type = genomic DNA
cccccccccccccc

SEQ ID NO: 1795 - DNA, 12 bp, Homo sapiens
  source 1..12: mol_type = genomic DNA
cccccccccccc

SEQ ID NO: 1796 - DNA, 12 bp, Homo sapiens
  source 1..12: mol_type = genomic DNA
cccccccccccc

SEQ ID NO: 1797 - DNA, 12 bp, Homo sapiens
  source 1..12: mol_type = genomic DNA
cccccccccccc

SEQ ID NO: 1798 - DNA, 12 bp, Homo sapiens
  source 1..12: mol_type = genomic DNA
cccccccccccc

SEQ ID NO: 1799 - DNA, 15 bp, Homo sapiens
  source 1..15: mol_type = genomic DNA
ccccccccccccccc

SEQ ID NO: 1800 - DNA, 12 bp, Homo sapiens
  source 1..12: mol_type = genomic DNA
cccccccccccc

SEQ ID NO: 1801 - DNA, 14 bp, Homo sapiens
  source 1..14: mol_type = genomic DNA
cccccccccccccc

SEQ ID NO: 1802 - DNA, 16 bp, Homo sapiens
  source 1..16: mol_type = genomic DNA
cccccccccccccccc

SEQ ID NO: 1803 - DNA, 17 bp, Homo sapiens
  source 1..17: mol_type = genomic DNA
ccccccccccccccccc

SEQ ID NO: 1804 - DNA, 17 bp, Homo sapiens
  source 1..17: mol_type = genomic DNA
ccccccccccccccccc

SEQ ID NO: 1805 - DNA, 12 bp, Homo sapiens
  source 1..12: mol_type = genomic DNA
cccccccccccc

SEQ ID NO: 1806 - DNA, 19 bp, Homo sapiens
  source 1..19: mol_type = genomic DNA
ccccccccccccccccccc

SEQ ID NO: 1807 - DNA, 13 bp, Homo sapiens
  source 1..13: mol_type = genomic DNA
ccccccccccccc

SEQ ID NO: 1808 - DNA, 12 bp, Homo sapiens
  source 1..12: mol_type = genomic DNA
cccccccccccc

SEQ ID NO: 1809 - DNA, 13 bp, Homo sapiens
  source 1..13: mol_type = genomic DNA
ccccccccccccc

SEQ ID NO: 1810 - DNA, 12 bp, Homo sapiens
  source 1..12: mol_type = genomic DNA
cccccccccccc

SEQ ID NO: 1811 - DNA, 13 bp, Homo sapiens
  source 1..13: mol_type = genomic DNA
ccccccccccccc

SEQ ID NO: 1812 - DNA, 18 bp, Homo sapiens
  source 1..18: mol_type = genomic DNA
cccccccccccccccccc

SEQ ID NO: 1813 - DNA, 12 bp, Homo sapiens
  source 1..12: mol_type = genomic DNA
cccccccccccc

SEQ ID NO: 1814 - DNA, 29 bp, Homo sapiens
  source 1..29: mol_type = genomic DNA
ccccccccccccccccccccccccccccc

SEQ ID NO: 1815 - DNA, 13 bp, Homo sapiens
  source 1..13: mol_type = genomic DNA
ccccccccccccc

SEQ ID NO: 1816 - DNA, 12 bp, Homo sapiens
  source 1..12: mol_type = genomic DNA
cccccccccccc

SEQ ID NO: 1817 - DNA, 12 bp, Homo sapiens
  source 1..12: mol_type = genomic DNA
cccccccccccc

SEQ ID NO: 1818 - DNA, 18 bp, Homo sapiens
  source 1..18: mol_type = genomic DNA
cccccccccccccccccc

SEQ ID NO: 1819 - DNA, 13 bp, Homo sapiens
  source 1..13: mol_type = genomic DNA
ccccccccccccc

SEQ ID NO: 1820 - DNA, 13 bp, Homo sapiens
  source 1..13: mol_type = genomic DNA
ccccccccccccc

SEQ ID NO: 1821 - DNA, 17 bp, Homo sapiens
  source 1..17: mol_type = genomic DNA
ccccccccccccccccc

SEQ ID NO: 1822 - DNA, 13 bp, Homo sapiens
  source 1..13: mol_type = genomic DNA
ccccccccccccc

SEQ ID NO: 1823 - DNA, 15 bp, Homo sapiens
  source 1..15: mol_type = genomic DNA
ccccccccccccccc

SEQ ID NO: 1824 - DNA, 13 bp, Homo sapiens
  source 1..13: mol_type = genomic DNA
ccccccccccccc

SEQ ID NO: 1825 - DNA, 12 bp, Homo sapiens
  source 1..12: mol_type = genomic DNA
cccccccccccc

SEQ ID NO: 1826 - DNA, 12 bp, Homo sapiens
  source 1..12: mol_type = genomic DNA
cccccccccccc

SEQ ID NO: 1827 - DNA, 13 bp, Homo sapiens
  source 1..13: mol_type = genomic DNA
ccccccccccccc

SEQ ID NO: 1828 - DNA, 14 bp, Homo sapiens
  source 1..14: mol_type = genomic DNA
cccccccccccccc

SEQ ID NO: 1829 - DNA, 12 bp, Homo sapiens
  source 1..12: mol_type = genomic DNA
cccccccccccc

SEQ ID NO: 1830 - DNA, 16 bp, Homo sapiens
  source 1..16: mol_type = genomic DNA
cccccccccccccccc

SEQ ID NO: 1831 - DNA, 14 bp, Homo sapiens
  source 1..14: mol_type = genomic DNA
cccccccccccccc

SEQ ID NO: 1832 - DNA, 13 bp, Homo sapiens
  source 1..13: mol_type = genomic DNA
ccccccccccccc

SEQ ID NO: 1833 - DNA, 16 bp, Homo sapiens
  source 1..16: mol_type = genomic DNA
cccccccccccccccc

SEQ ID NO: 1834 - DNA, 12 bp, Homo sapiens
  source 1..12: mol_type = genomic DNA
cccccccccccc

SEQ ID NO: 1835 - DNA, 13 bp, Homo sapiens
  source 1..13: mol_type = genomic DNA
ccccccccccccc

SEQ ID NO: 1836 - DNA, 13 bp, Homo sapiens
  source 1..13: mol_type = genomic DNA
ccccccccccccc

SEQ ID NO: 1837 - DNA, 13 bp, Homo sapiens
  source 1..13: mol_type = genomic DNA
ccccccccccccc

SEQ ID NO: 1838 - DNA, 12 bp, Homo sapiens
  source 1..12: mol_type = genomic DNA
cccccccccccc

SEQ ID NO: 1839 - DNA, 13 bp, Homo sapiens
  source 1..13: mol_type = genomic DNA
ccccccccccccc

SEQ ID NO: 1840 - DNA, 14 bp, Homo sapiens
  source 1..14: mol_type = genomic DNA
cccccccccccccc

SEQ ID NO: 1841 - DNA, 15 bp, Homo sapiens
  source 1..15: mol_type = genomic DNA
ccccccccccccccc

SEQ ID NO: 1842 - DNA, 13 bp, Homo sapiens
  source 1..13: mol_type = genomic DNA
ccccccccccccc

SEQ ID NO: 1843 - DNA, 17 bp, Homo sapiens
  source 1..17: mol_type = genomic DNA
ccccccccccccccccc

SEQ ID NO: 1844 - DNA, 17 bp, Homo sapiens
  source 1..17: mol_type = genomic DNA
ccccccccccccccccc

SEQ ID NO: 1845 - DNA, 12 bp, Homo sapiens
  source 1..12: mol_type = genomic DNA
cccccccccccc

SEQ ID NO: 1846 - DNA, 17 bp, Homo sapiens
  source 1..17: mol_type = genomic DNA
ccccccccccccccccc

SEQ ID NO: 1847 - DNA, 15 bp, Homo sapiens
  source 1..15: mol_type = genomic DNA
ccccccccccccccc

SEQ ID NO: 1848 - DNA, 17 bp, Homo sapiens
  source 1..17: mol_type = genomic DNA
ccccccccccccccccc

SEQ ID NO: 1849 - DNA, 12 bp, Homo sapiens
  source 1..12: mol_type = genomic DNA
cccccccccccc

SEQ ID NO: 1850 - DNA, 13 bp, Homo sapiens
  source 1..13: mol_type = genomic DNA
ccccccccccccc

SEQ ID NO: 1851 - DNA, 12 bp, Homo sapiens
  source 1..12: mol_type = genomic DNA
cccccccccccc

SEQ ID NO: 1852 - DNA, 16 bp, Homo sapiens
  source 1..16: mol_type = genomic DNA
cccccccccccccccc

SEQ ID NO: 1853 - DNA, 14 bp, Homo sapiens
  source 1..14: mol_type = genomic DNA
cccccccccccccc

SEQ ID NO: 1854 - DNA, 14 bp, Homo sapiens
  source 1..14: mol_type = genomic DNA
cccccccccccccc

SEQ ID NO: 1855 - DNA, 16 bp, Homo sapiens
  source 1..16: mol_type = genomic DNA
cccccccccccccccc

SEQ ID NO: 1856 - DNA, 18 bp, Homo sapiens
  source 1..18: mol_type = genomic DNA
cccccccccccccccccc

SEQ ID NO: 1857 - DNA, 12 bp, Homo sapiens
  source 1..12: mol_type = genomic DNA
cccccccccccc

SEQ ID NO: 1858 - DNA, 16 bp, Homo sapiens
  source 1..16: mol_type = genomic DNA
cccccccccccccccc

SEQ ID NO: 1859 - DNA, 12 bp, Homo sapiens
  source 1..12: mol_type = genomic DNA
cccccccccccc

SEQ ID NO: 1860 - DNA, 14 bp, Homo sapiens
  source 1..14: mol_type = genomic DNA
cccccccccccccc

SEQ ID NO: 1861 - DNA, 12 bp, Homo sapiens
  source 1..12: mol_type = genomic DNA
cccccccccccc

SEQ ID NO: 1862 - DNA, 12 bp, Homo sapiens
  source 1..12: mol_type = genomic DNA
cccccccccccc

SEQ ID NO: 1863 - DNA, 13 bp, Homo sapiens
  source 1..13: mol_type = genomic DNA
ccccccccccccc

SEQ ID NO: 1864 - DNA, 13 bp, Homo sapiens
  source 1..13: mol_type = genomic DNA
ccccccccccccc

SEQ ID NO: 1865 - DNA, 12 bp, Homo sapiens
  source 1..12: mol_type = genomic DNA
cccccccccccc

SEQ ID NO: 1866 - DNA, 12 bp, Homo sapiens
  source 1..12: mol_type = genomic DNA
cccccccccccc

SEQ ID NO: 1867 - DNA, 14 bp, Homo sapiens
  source 1..14: mol_type = genomic DNA
cccccccccccccc

SEQ ID NO: 1868 - DNA, 13 bp, Homo sapiens
  source 1..13: mol_type = genomic DNA
ccccccccccccc

SEQ ID NO: 1869 - DNA, 13 bp, Homo sapiens
  source 1..13: mol_type = genomic DNA
ccccccccccccc

SEQ ID NO: 1870 - DNA, 17 bp, Homo sapiens
  source 1..17: mol_type = genomic DNA
ccccccccccccccccc

SEQ ID NO: 1871 - DNA, 18 bp, Homo sapiens
  source 1..18: mol_type = genomic DNA
cccccccccccccccccc

SEQ ID NO: 1872 - DNA, 15 bp, Homo sapiens
  source 1..15: mol_type = genomic DNA
ccccccccccccccc

SEQ ID NO: 1873 - DNA, 12 bp, Homo sapiens
  source 1..12: mol_type = genomic DNA
cccccccccccc

SEQ ID NO: 1874 - DNA, 18 bp, Homo sapiens
  source 1..18: mol_type = genomic DNA
cccccccccccccccccc

SEQ ID NO: 1875 - DNA, 13 bp, Homo sapiens
  source 1..13: mol_type = genomic DNA
ccccccccccccc

SEQ ID NO: 1876 - DNA, 26 bp, Homo sapiens
  source 1..26: mol_type = genomic DNA
cccccccccccccccccccccccccc

SEQ ID NO: 1877 - DNA, 12 bp, Homo sapiens
  source 1..12: mol_type = genomic DNA
cccccccccccc

SEQ ID NO: 1878 - DNA, 14 bp, Homo sapiens
  source 1..14: mol_type = genomic DNA
cccccccccccccc

SEQ ID NO: 1879 - DNA, 14 bp, Homo sapiens
  source 1..14: mol_type = genomic DNA
cccccccccccccc

SEQ ID NO: 1880 - DNA, 12 bp, Homo sapiens
  source 1..12: mol_type = genomic DNA
cccccccccccc

SEQ ID NO: 1881 - DNA, 13 bp, Homo sapiens
  source 1..13: mol_type = genomic DNA
ccccccccccccc

SEQ ID NO: 1882 - DNA, 12 bp, Homo sapiens
  source 1..12: mol_type = genomic DNA
cccccccccccc

SEQ ID NO: 1883 - DNA, 13 bp, Homo sapiens
  source 1..13: mol_type = genomic DNA
ccccccccccccc

SEQ ID NO: 1884 - DNA, 14 bp, Homo sapiens
  source 1..14: mol_type = genomic DNA
cccccccccccccc

SEQ ID NO: 1885 - DNA, 16 bp, Homo sapiens
  source 1..16: mol_type = genomic DNA
cccccccccccccccc

SEQ ID NO: 1886 - DNA, 12 bp, Homo sapiens
  source 1..12: mol_type = genomic DNA
cccccccccccc

SEQ ID NO: 1887 - DNA, 12 bp, Homo sapiens
  source 1..12: mol_type = genomic DNA
cccccccccccc

SEQ ID NO: 1888 - DNA, 12 bp, Homo sapiens
  source 1..12: mol_type = genomic DNA
cccccccccccc

SEQ ID NO: 1889 - DNA, 12 bp, Homo sapiens
  source 1..12: mol_type = genomic DNA
cccccccccccc

SEQ ID NO: 1890 - DNA, 18 bp, Homo sapiens
  source 1..18: mol_type = genomic DNA
cccccccccccccccccc

SEQ ID NO: 1891 - DNA, 60 bp, Homo sapiens
  source 1..60: mol_type = genomic DNA
aggggggcatattaacagtcataaaattacatgtgagttgtgggaacacacgcacgcgcg

SEQ ID NO: 1892 - DNA, 60 bp, Homo sapiens
  source 1..60: mol_type = genomic DNA
catgcagtccttagacttccttagcctccaaccaaccactgtgaatacacaaacacacaa

SEQ ID NO: 1893 - DNA, 60 bp, Homo sapiens
  source 1..60: mol_type = genomic DNA
actctattacaattgtgtctggactttgggaaggtcctagcctgggagccccctcctgag

SEQ ID NO: 1894 - DNA, 60 bp, Homo sapiens
  source 1..60: mol_type = genomic DNA
ccaggcccagactgaggtcacacatcttccgaacccccaaggagtcaccccctcttccca

SEQ ID NO: 1895 - DNA, 60 bp, Homo sapiens
  source 1..60: mol_type = genomic DNA
agcctgccttttagcacttggatacacacagacccacggagctctctgtgtttggcctct

SEQ ID NO: 1896 - DNA, 60 bp, Homo sapiens
  source 1..60: mol_type = genomic DNA
tgaatagatcccttttagaagacattcagtagatccacagatcctccctctcccaagtgt

SEQ ID NO: 1897 - DNA, 60 bp, Homo sapiens
  source 1..60: mol_type = genomic DNA
cgtcccactgccttgaatagcctcctctcaccaaaccaccactcctgtctcaacctccac

SEQ ID NO: 1898 - DNA, 60 bp, Homo sapiens
  source 1..60: mol_type = genomic DNA
aacctcccctctttcagggcctcctcagttgagtgcacaatgccaaccacttgctgaaac

SEQ ID NO: 1899 - DNA, 60 bp, Homo sapiens
  source 1..60: mol_type = genomic DNA
gatggagggtagcagcagaggccagagaaatgaggcagccaagcagggttggctttgaaa

SEQ ID NO: 1900 - DNA, 60 bp, Homo sapiens
  source 1..60: mol_type = genomic DNA
acaacccagctctgtcaataggcaaatacctgtataccataggtacacacctgctaaatg

SEQ ID NO: 1901 - DNA, 60 bp, Homo sapiens
  source 1..60: mol_type = genomic DNA
tttgcttgagggcatccctagcattatactgtaacctttattctgtttacgtatttcctg

SEQ ID NO: 1902 - DNA, 60 bp, Homo sapiens
  source 1..60: mol_type = genomic DNA
tctcagctgcccttacacaccctcctcttagctgcagctctgcatgtacttgtgtgcatg

SEQ ID NO: 1903 - DNA, 60 bp, Homo sapiens
  source 1..60: mol_type = genomic DNA
cagcacaactaatagggggtttacaaacagtgagcaagtgtagcctctgctgggtggtaa

SEQ ID NO: 1904 - DNA, 60 bp, Homo sapiens
  source 1..60: mol_type = genomic DNA
caaccctaagtttacaataatatctcaaggcaaaaactcaaacaaaacaaggcacacacg

SEQ ID NO: 1905 - DNA, 60 bp, Homo sapiens
  source 1..60: mol_type = genomic DNA
acaatcctgctgcaatgggtagtaccaaagaaagccagtggagctcaaacttttgaaagg

SEQ ID NO: 1906 - DNA, 60 bp, Homo sapiens
  source 1..60: mol_type = genomic DNA
ttaaggtggctttgaagagtggagttgtgaggttgggtgtgcagccgaggatctatgaag

SEQ ID NO: 1907 - DNA, 60 bp, Homo sapiens
  source 1..60: mol_type = genomic DNA
cctgaaaggaaaatgtccaatgccgtgggtgagtgtccagatggggaggcctttagacat

SEQ ID NO: 1908 - DNA, 60 bp, Homo sapiens
  source 1..60: mol_type = genomic DNA
tgacgccatccctgatctgactgatacatgtttaaactcatgtaagaacatacacacact

SEQ ID NO: 1909 - DNA, 60 bp, Homo sapiens
  source 1..60: mol_type = genomic DNA
aatcatttctttttaatgccctgaacttgactttatgtttggtgactctgctccctttgg

SEQ ID NO: 1910 - DNA, 60 bp, Homo sapiens
  source 1..60: mol_type = genomic DNA
ccaccctcaggaggtaacagtcaagatgccaacaggagaattcgttgcctgatcagtcag

SEQ ID NO: 1911 - DNA, 60 bp, Homo sapiens
  source 1..60: mol_type = genomic DNA
gctagggctctgtcacaaaatatggattaaatctagaactgtgcatctctgagatagaaa

SEQ ID NO: 1912 - DNA, 60 bp, Homo sapiens
  source 1..60: mol_type = genomic DNA
ttaagctaggattttgaccttagacttatgtgctattctaccttggtaaagctcaagaat

SEQ ID NO: 1913 - DNA, 60 bp, Homo sapiens
  source 1..60: mol_type = genomic DNA
ctaaataactagtcagcaatctatttaaatgtgaagagcctatctctggtctttaaataa

SEQ ID NO: 1914 - DNA, 60 bp, Homo sapiens
  source 1..60: mol_type = genomic DNA
gaggcaaccagctaagaaagaggcaagaatgccatcggagtatgtaccaaaaaacttatg

SEQ ID NO: 1915 - DNA, 60 bp, Homo sapiens
  source 1..60: mol_type = genomic DNA
atgttgcttggaaaacccaacacagggaccaaaacccctgtactcttatacctctcactg

SEQ ID NO: 1916 - DNA, 60 bp, Homo sapiens
  source 1..60: mol_type = genomic DNA
gctaatttgagagcttaggatgggctatgcagactttttagcagcatatgtgtgtgatat

SEQ ID NO: 1917 - DNA, 60 bp, Homo sapiens
  source 1..60: mol_type = genomic DNA
gaaggctaagtacagcagactgtacccccaggagagggggctgatgggtgaccctctggc

SEQ ID NO: 1918 - DNA, 60 bp, Homo sapiens
  source 1..60: mol_type = genomic DNA
tttcccttccatcatgtacttgggtctgtccccaactgctcataactccccactatcact

SEQ ID NO: 1919 - DNA, 60 bp, Homo sapiens
  source 1..60: mol_type = genomic DNA
gcttactggcattttctccaattacttagggaaaacaatgaaaagaacagcaagtcccct

SEQ ID NO: 1920 - DNA, 60 bp, Homo sapiens
  source 1..60: mol_type = genomic DNA
taaagcagtgtgaatagccttcaagcatgtgaataatcttccatcttccccgccacacat

SEQ ID NO: 1921 - DNA, 60 bp, Homo sapiens
  source 1..60: mol_type = genomic DNA
gacaagcacatgggagatagtgtcattacaggatgtgtcaatgtgtcatggccaatactt

SEQ ID NO: 1922 - DNA, 60 bp, Homo sapiens
  source 1..60: mol_type = genomic DNA
gtttattgacttattctctagggacagggaactcatcactaaatagacatacttgtgcat

SEQ ID NO: 1923 - DNA, 60 bp, Homo sapiens
  source 1..60: mol_type = genomic DNA
aagtgttctgaaaaagaccttatgtataccaagccatccaccttcccatcccactcagac

SEQ ID NO: 1924 - DNA, 60 bp, Homo sapiens
  source 1..60: mol_type = genomic DNA
atgacaagaggaattttaaagtaattactttcttaggagacataccgacacaatttgtat

SEQ ID NO: 1925 - DNA, 60 bp, Homo sapiens
  source 1..60: mol_type = genomic DNA
ctccccttctagagtggaaaatatttaggggcgttagctttttatggtttgttttttcaa

SEQ ID NO: 1926 - DNA, 60 bp, Homo sapiens
  source 1..60: mol_type = genomic DNA
tagatgcagagcaaacagttgatatagggactatcttctagaatctcacaatcaacttga

SEQ ID NO: 1927 - DNA, 60 bp, Homo sapiens
  source 1..60: mol_type = genomic DNA
tctgtccaccctaaatccctagtataaaggtcctcagtttaaagacatacacccatacca

SEQ ID NO: 1928 - DNA, 60 bp, Homo sapiens
  source 1..60: mol_type = genomic DNA
aaagctccaccccacgggaagatcatgtctgccgtgtactagtctaatgctcacagttgt

SEQ ID NO: 1929 - DNA, 60 bp, Homo sapiens
  source 1..60: mol_type = genomic DNA
ctataactcacagaagctccacagggataatctgttcccattaaactggggagaggttaa

SEQ ID NO: 1930 - DNA, 60 bp, Homo sapiens
  source 1..60: mol_type = genomic DNA
ccggagtgactgtccatatggttccaacactgtcccttcctttttctcttgaaaagagag

SEQ ID NO: 1931 - DNA, 60 bp, Homo sapiens
  source 1..60: mol_type = genomic DNA
gccaaagatcatgtggccacaaattgtgacacttactctatggaacctaaggtctttgct

SEQ ID NO: 1932 - DNA, 60 bp, Homo sapiens
  source 1..60: mol_type = genomic DNA
tattcatttaatatcttctacatataatcacaccacctttacctaggtgatcacttaggt

SEQ ID NO: 1933 - DNA, 60 bp, Homo sapiens
  source 1..60: mol_type = genomic DNA
gataagattgagggcaactggaagcccagatagagaccctccccacttggtctcttccca

SEQ ID NO: 1934 - DNA, 60 bp, Homo sapiens
  source 1..60: mol_type = genomic DNA
agacccatcagcctgatcagatgtatattgagctccattgtgtgccacagccttgggtga

SEQ ID NO: 1935 - DNA, 60 bp, Homo sapiens
  source 1..60: mol_type = genomic DNA
ggaaaaaaattgctgacaaatctgcttggaatatctgagtttttccaacgcggaaagaaa

SEQ ID NO: 1936 - DNA, 60 bp, Homo sapiens
  source 1..60: mol_type = genomic DNA
ggccagtagatggcagaaagtgacaagaaaaggactggaaactgggacccccccccccac

SEQ ID NO: 1937 - DNA, 60 bp, Homo sapiens
  source 1..60: mol_type = genomic DNA
gcacttaccctaggctaggcttctttgttactcattttagtgtcccttacacactacact

SEQ ID NO: 1938 - DNA, 60 bp, Homo sapiens
  source 1..60: mol_type = genomic DNA
agtagtgtggcctttgctggtagccaaaagtaacctgagcatttctagtgagggacacat

SEQ ID NO: 1939 - DNA, 60 bp, Homo sapiens
  source 1..60: mol_type = genomic DNA
gtctggaacactcaatttcactattcctactcggggatgtcagtgaaccctgtgcatgct

SEQ ID NO: 1940 - DNA, 60 bp, Homo sapiens
  source 1..60: mol_type = genomic DNA
attaatctggctccagttttgaggagatgcagtatctccccattttgtatttgtgtagaa

SEQ ID NO: 1941 - DNA, 60 bp, Homo sapiens
  source 1..60: mol_type = genomic DNA
aaggtagtcttgtgatttgtgaagcttttatatgtccccatacccatttcaggtacattt

SEQ ID NO: 1942 - DNA, 60 bp, Homo sapiens
  source 1..60: mol_type = genomic DNA
ccatttaacatagaaaggaatcccattcctttctcaaatcacacaggccatacatattgg

SEQ ID NO: 1943 - DNA, 60 bp, Homo sapiens
  source 1..60: mol_type = genomic DNA
ggcaactgacaaaaccctcccttccataggtacatccacgtatacagcgtgtgtgagagt

SEQ ID NO: 1944 - DNA, 60 bp, Homo sapiens
  source 1..60: mol_type = genomic DNA
cacttgaagcatccctggtgtttttaataatcacctccagcctgtcacgtgaaattaata

SEQ ID NO: 1945 - DNA, 60 bp, Homo sapiens
  source 1..60: mol_type = genomic DNA
aaggataaccctggactctttggaactcaggatacaggcattaaacatgggtccatgtat

SEQ ID NO: 1946 - DNA, 60 bp, Homo sapiens
  source 1..60: mol_type = genomic DNA
gccatcaggaaaacaacaaatgtgcccagagagagttaatgcatttataaaaaccaaaat

SEQ ID NO: 1947 - DNA, 60 bp, Homo sapiens
  source 1..60: mol_type = genomic DNA
tgcctataaaaagcagtctgaatgagctactctctgcctgtagtgtctctgctccccaaa

SEQ ID NO: 1948 - DNA, 60 bp, Homo sapiens
  source 1..60: mol_type = genomic DNA
agatgagctgtggatatagagtccgcacagcctgcgggagacagaatgtaattccttcca

SEQ ID NO: 1949 - DNA, 60 bp, Homo sapiens
  source 1..60: mol_type = genomic DNA
agtaagagttaataaactccactaattgggtcttttgaataacttaccctttgcacattt

SEQ ID NO: 1950 - DNA, 60 bp, Homo sapiens
  source 1..60: mol_type = genomic DNA
caaaatcgtgtcctaaggattcctacagattcaactgatatgaagtcatcataaatactt

SEQ ID NO: 1951 - DNA, 60 bp, Homo sapiens
  source 1..60: mol_type = genomic DNA
cactgttaggaaaagtatgcttaagcctattaaggccagtattgtttgtttatttctttc

SEQ ID NO: 1952 - DNA, 60 bp, Homo sapiens
  source 1..60: mol_type = genomic DNA
cgcttatggccaggtggttcaattgtcaagcacaataaagggaccaggtagaaaattagc

SEQ ID NO: 1953 - DNA, 60 bp, Homo sapiens
  source 1..60: mol_type = genomic DNA
cttctaaactttccctatcccttgtaccttttccatatctaccctacacacatgcgcacg

SEQ ID NO: 1954 - DNA, 60 bp, Homo sapiens
  source 1..60: mol_type = genomic DNA
cagttttgcctgaacagtcaatgttccttccaagatattatgattcctttattatgattc

SEQ ID NO: 1955 - DNA, 60 bp, Homo sapiens
  source 1..60: mol_type = genomic DNA
atatgggtcaagcaattctgtctagtagcatgggtcggcctcagaaaccagcttacacat

SEQ ID NO: 1956 - DNA, 60 bp, Homo sapiens
  source 1..60: mol_type = genomic DNA
atagcgtcatagcactgggaagagggacaaagatgaaagacacacggacctatgggcatg

SEQ ID NO: 1957 - DNA, 60 bp, Homo sapiens
  source 1..60: mol_type = genomic DNA
tgggggcaggttttaaagattggttccagtcccactgaatttgcagcgacagtgagagag

SEQ ID NO: 1958 - DNA, 60 bp, Homo sapiens
  source 1..60: mol_type = genomic DNA
attttccactccttgttttggcatgcctccaatttaacagctttgatgaggaagggagat

SEQ ID NO: 1959 - DNA, 60 bp, Homo sapiens
  source 1..60: mol_type = genomic DNA
caaggggtgcccagatcaccagcagagaggaggcagtggtgcttatctccttattatgcg

SEQ ID NO: 1960 - DNA, 60 bp, Homo sapiens
  source 1..60: mol_type = genomic DNA
agttggttttagggaggggacaacgcatcgagggcccttcccctacttggctgccccgtg

SEQ ID NO: 1961 - DNA, 60 bp, Homo sapiens
  source 1..60: mol_type = genomic DNA
attgaatgccccaactgcatgctgtggtctgcaagcctgtttatagcacataagccctac

SEQ ID NO: 1962 - DNA, 60 bp, Homo sapiens
  source 1..60: mol_type = genomic DNA
tctggggaggatgtggcactcatgatcgaatcagacaatggataggactgcaccagtttt

SEQ ID NO: 1963 - DNA, 60 bp, Homo sapiens
  source 1..60: mol_type = genomic DNA
gtactaaacctgggtgccatccaccatccaactgtctgccttctacaaccacttattgaa

SEQ ID NO: 1964 - DNA, 60 bp, Homo sapiens
  source 1..60: mol_type = genomic DNA
ggaatatgaatcatcaaaatatccctgaggacaaattgcaatgtaggagtgaatgatgtt

SEQ ID NO: 1965 - DNA, 60 bp, Homo sapiens
  source 1..60: mol_type = genomic DNA
ccacatcacccgtataccctttgcttcattacagccacacacagttcctcacactctgtt

SEQ ID NO: 1966 - DNA, 60 bp, Homo sapiens
  source 1..60: mol_type = genomic DNA
gggcgtgcatgagcacaggcgcgcacacatgcacatgggcctgctggatacatgctcgcg

SEQ ID NO: 1967 - DNA, 60 bp, Homo sapiens
  source 1..60: mol_type = genomic DNA
tctctaaaactagtatatcaccatctatcatgaaacagctctaccaggaagggtgtgtct

SEQ ID NO: 1968 - DNA, 60 bp, Homo sapiens
  source 1..60: mol_type = genomic DNA
gataaattggtcatagccatttattcccattatatgagcatgtgtacaatctatgtgtga

SEQ ID NO: 1969 - DNA, 60 bp, Homo sapiens
  source 1..60: mol_type = genomic DNA
ctgctcctgccggaatagaagcaggatattaaccatattcagttgaccttagaaaagcaa

SEQ ID NO: 1970 - DNA, 60 bp, Homo sapiens
  source 1..60: mol_type = genomic DNA
caaggagtgcagccaggggctggctcccgggaggacatgggcagaggcttaggtcccctt

SEQ ID NO: 1971 - DNA, 60 bp, Homo sapiens
  source 1..60: mol_type = genomic DNA
ctattttaggaggacagaagtggcctaaaacatgtggccattaagctagaattttaaagg

SEQ ID NO: 1972 - DNA, 60 bp, Homo sapiens
  source 1..60: mol_type = genomic DNA
ggtttagaaaaataatgagtgctgtctgcctgctaggaactccaagtttagtggagaaag

SEQ ID NO: 1973 - DNA, 60 bp, Homo sapiens
  source 1..60: mol_type = genomic DNA
gcctattctactttcacctccaaattctccccaaatcctttagtcttcaaacatacacat

SEQ ID NO: 1974 - DNA, 60 bp, Homo sapiens
  source 1..60: mol_type = genomic DNA
cgttgatagtgggatagtggagccataggtgttctggagcacatgtgcttttgcacatcg

SEQ ID NO: 1975 - DNA, 60 bp, Homo sapiens
  source 1..60: mol_type = genomic DNA
gtttcagtaaacatagtggtctgggaatgaaaatgcaaacagggtaggagtcaagaaaac

SEQ ID NO: 1976 - DNA, 60 bp, Homo sapiens
  source 1..60: mol_type = genomic DNA
ttctctctagatcaatggaaaacactcctggctgcaaaacaagtcagtttctaggcagat

SEQ ID NO: 1977 - DNA, 60 bp, Homo sapiens
  source 1..60: mol_type = genomic DNA
cagttattttagtgaataatggaaaattgaagctgtaaaattacaagccagctgtcgtgt

SEQ ID NO: 1978 - DNA, 60 bp, Homo sapiens
  source 1..60: mol_type = genomic DNA
caaagattccttgtaaagagaatgattaaatgcaatgcataacacattgaataaatacat

SEQ ID NO: 1979 - DNA, 60 bp, Homo sapiens
  source 1..60: mol_type = genomic DNA
ttgctaaacccggtgacatgtgagtgacataaaagctacctcaaacgggcatgtgcacat

SEQ ID NO: 1980 - DNA, 60 bp, Homo sapiens
  source 1..60: mol_type = genomic DNA
cagctgtgtggggccccagaagccaagcctcactgtgctgggcagtagtggttcagcacc

SEQ ID NO: 1981 - DNA, 60 bp, Homo sapiens
  source 1..60: mol_type = genomic DNA
aaaataacaattcgctgtagtccataaggccctatttcaaatattttgcaaacgtgtatt

SEQ ID NO: 1982 - DNA, 60 bp, Homo sapiens
  source 1..60: mol_type = genomic DNA
agcctttggtttctgaacaatcacagcagtgggccagcagccattaagcatgtgtgcatg

SEQ ID NO: 1983 - DNA, 60 bp, Homo sapiens
  source 1..60: mol_type = genomic DNA
gttccccttttcttctcttcaaacccacagatagggttaaatcttatctttaacacacat

SEQ ID NO: 1984 - DNA, 60 bp, Homo sapiens
  source 1..60: mol_type = genomic DNA
tggcaaacatgtgaacaatgctactcatactaaaagtggggaccctcgccgcccccttgt

SEQ ID NO: 1985 - DNA, 60 bp, Homo sapiens
  source 1..60: mol_type = genomic DNA
gggaatatccagacattacctctttctcactctctatcaccacctcctcccccaacacat

SEQ ID NO: 1986 - DNA, 60 bp, Homo sapiens
  source 1..60: mol_type = genomic DNA
aaatcctgataaaatgaaaaagtttatcagtggctaataattactggacggttttcagtt

SEQ ID NO: 1987 - DNA, 60 bp, Homo sapiens
  source 1..60: mol_type = genomic DNA
aaattgagacatacatgtattttgtgcgatgacaactgtgtttcacgctgcgcgtgcgcg

SEQ ID NO: 1988 - DNA, 60 bp, Homo sapiens
  source 1..60: mol_type = genomic DNA
attctgcctaaaatcacaaaaatagtgtgttaactttccatctgagtacattttgggagt

SEQ ID NO: 1989 - DNA, 60 bp, Homo sapiens
  source 1..60: mol_type = genomic DNA
tgaaggctagtatctcctactccaccatcacttacctgaataaactttgattggtttaat

SEQ ID NO: 1990 - DNA, 60 bp, Homo sapiens
  source 1..60: mol_type = genomic DNA
agcttagggatccaccaaggtgaactcaccagagccatgcaggtgcatagtattgtccct

SEQ ID NO: 1991 - DNA, 60 bp, Homo sapiens
  source 1..60: mol_type = genomic DNA
gtgccatttgaaactgtccccttctagaacaatgcagaatatgtatctgtatatagatgt

SEQ ID NO: 1992 - DNA, 60 bp, Homo sapiens
  source 1..60: mol_type = genomic DNA
gcaattttggaaatgcaaagtattggtagttaggaaatgaatataaatagatacacactg

SEQ ID NO: 1993 - DNA, 60 bp, Homo sapiens
  source 1..60: mol_type = genomic DNA
accacctaggacagtgctctactttactcctcccaccccccgctgcccacatacacacat

SEQ ID NO: 1994 - DNA, 60 bp, Homo sapiens
  source 1..60: mol_type = genomic DNA
ctccaatttctgggtgaggttgttgcctcagcctcttcacaatgactttctaaaaaaaat

SEQ ID NO: 1995 - DNA, 60 bp, Homo sapiens
  source 1..60: mol_type = genomic DNA
ccagttggatgtactttattttcttgaattggaaaataccagttggatatatgtcaactt

SEQ ID NO: 1996 - DNA, 60 bp, Homo sapiens
  source 1..60: mol_type = genomic DNA
tcagtacagagagctcagagggaactcccccgacttgagtaagggacctccctgccaccc

SEQ ID NO: 1997 - DNA, 60 bp, Homo sapiens
  source 1..60: mol_type = genomic DNA
atactaatatagccaaactggtggttccccatcacaaatgctctcttcccctcttccctg

SEQ ID NO: 1998 - DNA, 60 bp, Homo sapiens
  source 1..60: mol_type = genomic DNA
tctatccaaggttgaagagatgctgcacacactgacacattctctttttattatcaacaa

SEQ ID NO: 1999 - DNA, 60 bp, Homo sapiens
  source 1..60: mol_type = genomic DNA
aacacatagaacagtgacgatgcacttatctttggaggagaaaaagctctctctctctct

SEQ ID NO: 2000 - DNA, 60 bp, Homo sapiens
  source 1..60: mol_type = genomic DNA
ctgaagctgagctgtatgcagtggacataacctactgcataccctccctctcccacccca

SEQ ID NO: 2001 - DNA, 60 bp, Homo sapiens
  source 1..60: mol_type = genomic DNA
gaccaaaggaccacagacctaagggaaatcatgagatctcaagacagctttctctcatat

SEQ ID NO: 2002 - DNA, 60 bp, Homo sapiens
  source 1..60: mol_type = genomic DNA
acacgggaacatttcaaaacatcactttttcctcccccagctccaacatgcatgcacatg

SEQ ID NO: 2003 - DNA, 60 bp, Homo sapiens
  source 1..60: mol_type = genomic DNA
gacttcttatgataatatgcaatataaaacattgagaaaagtgaagcatcagctaatctt

SEQ ID NO: 2004 - DNA, 60 bp, Homo sapiens
  source 1..60: mol_type = genomic DNA
tgtttaatctgggcatatatatgataaggcagtaaaacaatgtaaacgtgcacagacgcg

SEQ ID NO: 2005 - DNA, 60 bp, Homo sapiens
  source 1..60: mol_type = genomic DNA
atggtgctgacctctcccaccatggtatagctgcctctttcacctcataaccaccaccac

SEQ ID NO: 2006 - DNA, 60 bp, Homo sapiens
  source 1..60: mol_type = genomic DNA
aggggtccgcactgcaatccgggaatgcgtgcgggaaccggaagcagggtaccggccccg

SEQ ID NO: 2007 - DNA, 60 bp, Homo sapiens
  source 1..60: mol_type = genomic DNA
gatgcagaaacacactctatactcagagagatgtccccagacacacataccaacatagag

SEQ ID NO: 2008 - DNA, 60 bp, Homo sapiens
  source 1..60: mol_type = genomic DNA
tttgagcaactttgtgttgatctactggttcaatgaatatgtatttgatggtccccaaac

SEQ ID NO: 2009 - DNA, 60 bp, Homo sapiens
  source 1..60: mol_type = genomic DNA
cccactcttcaatatggaaacccttagttcccttgtttttagtcctgtacttcaccactt

SEQ ID NO: 2010 - DNA, 60 bp, Homo sapiens
  source 1..60: mol_type = genomic DNA
cagatttggggcttgatgctgtgcatatgtcacctgcttcctagtctcagctgcttatgc

SEQ ID NO: 2011 - DNA, 60 bp, Homo sapiens
  source 1..60: mol_type = genomic DNA
tcttcgcccccatcctaatcctatccctataccaacatatgctttctctcgctctctctg

SEQ ID NO: 2012 - DNA, 60 bp, Homo sapiens
  source 1..60: mol_type = genomic DNA
aaacaggtgactataaaaaccatctctgtttctctccaatacaccatactccctcttcca

SEQ ID NO: 2013 - DNA, 60 bp, Homo sapiens
  source 1..60: mol_type = genomic DNA
ttgtatgctaaaaataccgtgtacatttggacacatctggatatattgatacgcacacaa

SEQ ID NO: 2014 - DNA, 60 bp, Homo sapiens
  source 1..60: mol_type = genomic DNA
gaggatctcaaataatttagtgttagaaaacacacttcagccagttgtagtccacctgtc

SEQ ID NO: 2015 - DNA, 60 bp, Homo sapiens
  source 1..60: mol_type = genomic DNA
actatgaaaataagtcttaactagttgacctcatgatgaaagacatatatgacagtcatg

SEQ ID NO: 2016 - DNA, 60 bp, Homo sapiens
  source 1..60: mol_type = genomic DNA
tgaagacagtgaatagaattaccttagaagtatctaaatgggaccaccattagcaataaa

SEQ ID NO: 2017 - DNA, 60 bp, Homo sapiens
  source 1..60: mol_type = genomic DNA
agacctggagaacaataatctgcactcgggtaccacatattaccaactgtatgaaaaagt

SEQ ID NO: 2018 - DNA, 60 bp, Homo sapiens
  source 1..60: mol_type = genomic DNA
ctacttggttaggtgtttctatatatcttagctaattcgaccaaattaaagttagcattt

SEQ ID NO: 2019 - DNA, 60 bp, Homo sapiens
  source 1..60: mol_type = genomic DNA
aataaacctgattatttttgagtctctaggtgtaatttgaactgtgatgactataataag

SEQ ID NO: 2020 - DNA, 60 bp, Homo sapiens
  source 1..60: mol_type = genomic DNA
agttttgtggtttccacatacaactatcctaatagcagctgcttcccaacctccccccac

SEQ ID NO: 2021 - DNA, 60 bp, Homo sapiens
  source 1..60: mol_type = genomic DNA
attttgcttttcacgaccatgactgtatcagaagatataacttggaaagagattgtaaag

SEQ ID NO: 2022 - DNA, 60 bp, Homo sapiens
  source 1..60: mol_type = genomic DNA
aggcaccgggtaaggtggagcctaggctgtcccttgtgcaaagccgaactttggagtgtg

SEQ ID NO: 2023 - DNA, 60 bp, Homo sapiens
  source 1..60: mol_type = genomic DNA
gctccatacagattatcgcttctcagcatttggcaccgcacgtcctcatgtgcgcacgcg

SEQ ID NO: 2024 - DNA, 60 bp, Homo sapiens
  source 1..60: mol_type = genomic DNA
ataccaaatctgagtcctgggacaggtatatctctccatcactagtgcacatgtacacaa

SEQ ID NO: 2025 - DNA, 60 bp, Homo sapiens
  source 1..60: mol_type = genomic DNA
cttgcaaggaggcgatttggctgagttggtcccctagtctctagttccctctctctcttt

SEQ ID NO: 2026 - DNA, 60 bp, Homo sapiens
  source 1..60: mol_type = genomic DNA
gttcctctctcttttctgctccccccacccttccccaaatgaaccagctctgcataagca

SEQ ID NO: 2027 - DNA, 60 bp, Homo sapiens
  source 1..60: mol_type = genomic DNA
gctaaactaggatattctcaggatccagagacctggagatcactaagtggcacatttgaa

SEQ ID NO: 2028 - DNA, 60 bp, Homo sapiens
  source 1..60: mol_type = genomic DNA
ttctgtcagtggctgcacgaatctggaagcgtttgctaacgccagggtagcgcgcgcgcg

SEQ ID NO: 2029 - DNA, 60 bp, Homo sapiens
  source 1..60: mol_type = genomic DNA
gagggcccctcaatgtcataaatacaccagacagattgaagatgggggaaatctctctct

SEQ ID NO: 2030 - DNA, 60 bp, Homo sapiens
  source 1..60: mol_type = genomic DNA
tgtgcctggcctagtcaccgcaccaggtctagtcttctaatatctatatagtctgcagat

SEQ ID NO: 2031 - DNA, 60 bp, Homo sapiens
  source 1..60: mol_type = genomic DNA
tctgttctaccagtctagtgacttgatagggtctctcaagaagggaaattcctacgcacg

SEQ ID NO: 2032 - DNA, 60 bp, Homo sapiens
  source 1..60: mol_type = genomic DNA
ctcttctcgacctggggggaaacccagtagggttccatcgcgaaattaaacccgccccca

SEQ ID NO: 2033 - DNA, 60 bp, Homo sapiens
  source 1..60: mol_type = genomic DNA
ctttttgcatcaacacccttaggcctattttagtttaacaatgagagcttcaccagtaga

SEQ ID NO: 2034 - DNA, 60 bp, Homo sapiens
  source 1..60: mol_type = genomic DNA
atcctcctggtcaaagagaatttccttgcaagtccttacactccaggcaatggtataaga

SEQ ID NO: 2035 - DNA, 60 bp, Homo sapiens
  source 1..60: mol_type = genomic DNA
ttaccataatgtaacttagaacacacattgaagagctgaaagttcactgcaaacaggtta

SEQ ID NO: 2036 - DNA, 60 bp, Homo sapiens
  source 1..60: mol_type = genomic DNA
agacgatttttcaatctctgcctcttcatacattcggaaacctccttgctcacacacact

SEQ ID NO: 2037 - DNA, 60 bp, Homo sapiens
  source 1..60: mol_type = genomic DNA
tattctctaataacctacagcaataacctgtaagaatttctaataattgaaaataccaat

SEQ ID NO: 2038 - DNA, 60 bp, Homo sapiens
  source 1..60: mol_type = genomic DNA
tatacttcactagttttggccacttgtacatgcgctagtcctagctaaaaataagctaaa

SEQ ID NO: 2039 - DNA, 60 bp, Homo sapiens
  source 1..60: mol_type = genomic DNA
catttcattccattcaatcaaaggaagcctaattatcttgttttctgattcatcagtcta

SEQ ID NO: 2040 - DNA, 60 bp, Homo sapiens
  source 1..60: mol_type = genomic DNA
atgaggaaagtgaggagtgagaatctttcaccttctgtacattaatatatggaatagcat

SEQ ID NO: 2041 - DNA, 60 bp, Homo sapiens
  source 1..60: mol_type = genomic DNA
gactacaacctgattatatgaactcatatcttagtgttcctcagactttcacatggacaa

SEQ ID NO: 2042 - DNA, 60 bp, Homo sapiens
  source 1..60: mol_type = genomic DNA
acatatgaacatccttctaattgcactaaagagagtgagagtacatgtgtagagcatgtg

SEQ ID NO: 2043 - DNA, 60 bp, Homo sapiens
  source 1..60: mol_type = genomic DNA
gttcatgaagcaccctccacaaataaatacattctgcccaaaacacaaacacatgtgcat

SEQ ID NO: 2044 - DNA, 60 bp, Homo sapiens
  source 1..60: mol_type = genomic DNA
taattgtgcaatcccttagctatttgctgccaccacgcatacacacacgtacatagtttt

SEQ ID NO: 2045 - DNA, 60 bp, Homo sapiens
  source 1..60: mol_type = genomic DNA
ttctgtgttttattctcttttccagtaaaaactgcatctgtgtgcgcgcgcacacacgtg

SEQ ID NO: 2046 - DNA, 60 bp, Homo sapiens
  source 1..60: mol_type = genomic DNA
gtttagctttcttctaagagactcaactgctatatctaatgtaaaatcaccacccccacc

SEQ ID NO: 2047 - DNA, 60 bp, Homo sapiens
  source 1..60: mol_type = genomic DNA
aagtctcagttctttacctgcctgattaacaaggttgttgggaaggtatcaaatgtaatt

SEQ ID NO: 2048 - DNA, 60 bp, Homo sapiens
  source 1..60: mol_type = genomic DNA
ctttcatattcccccactaaaaacacacgtatcaacacatactctgttgtgtacacacgt

SEQ ID NO: 2049 - DNA, 60 bp, Homo sapiens
  source 1..60: mol_type = genomic DNA
aatcagtcctctcttcatcagaatagatctccatgccccatccccacccccgccccccac

SEQ ID NO: 2050 - DNA, 60 bp, Homo sapiens
  source 1..60: mol_type = genomic DNA
atcatggctctagatatttcatccaagaacatgttccagactacagtactgttaaaaaaa

SEQ ID NO: 2051 - DNA, 60 bp, Homo sapiens
  source 1..60: mol_type = genomic DNA
tatactccatgagacttattttctgtgtcctctcacttccctatggttactcaattccct

SEQ ID NO: 2052 - DNA, 60 bp, Homo sapiens
  source 1..60: mol_type = genomic DNA
tcttgtgaatcagcttacatttacaggccccagaaaattgttccagatccctccctgaaa

SEQ ID NO: 2053 - DNA, 60 bp, Homo sapiens
  source 1..60: mol_type = genomic DNA
ttagattaatgagtaggtaccatcaccttttcatggttatctgccagactctgaatgtaa

SEQ ID NO: 2054 - DNA, 60 bp, Homo sapiens
  source 1..60: mol_type = genomic DNA
atcttcatactgaaatcacttataatcaacacctgccttcccccatgcccctaaacacat

SEQ ID NO: 2055 - DNA, 60 bp, Homo sapiens
  source 1..60: mol_type = genomic DNA
ggtcttctaccgtaatgataaattatatagttaccgtcgctgttgggtgaatacacactt

SEQ ID NO: 2056 - DNA, 60 bp, Homo sapiens
  source 1..60: mol_type = genomic DNA
cctctctatttcatgctagcaaaatctacattttctaggctcattttgtcacgtgtatct

SEQ ID NO: 2057 - DNA, 60 bp, Homo sapiens
  source 1..60: mol_type = genomic DNA
gaatattgccttacatataagcccctaatatatcttaagaatgcttgtgtatgactatgt

SEQ ID NO: 2058 - DNA, 60 bp, Homo sapiens
  source 1..60: mol_type = genomic DNA
cttcaatactgtgaactcagcccttatgagcatgcacgcgcatgcgcacgcgcgcgcgcg

SEQ ID NO: 2059 - DNA, 60 bp, Homo sapiens
  source 1..60: mol_type = genomic DNA
tgttccttatcttaggcctgcttctcgttcactctgccttctggaccgctaggtagaagt

SEQ ID NO: 2060 - DNA, 60 bp, Homo sapiens
  source 1..60: mol_type = genomic DNA
ccactgacagaaacggaggcagctccaagttcttagctgttcaaagcacgcgcgcgcgtg

SEQ ID NO: 2061 - DNA, 60 bp, Homo sapiens
  source 1..60: mol_type = genomic DNA
gcaagtcagaggatccagttcagatctcacattctgctgttataaggttctggtcctggt

SEQ ID NO: 2062 - DNA, 60 bp, Homo sapiens
  source 1..60: mol_type = genomic DNA
accaagttttagctcttttatggaaaagtacagctttttaacacaaatatataatatcat

SEQ ID NO: 2063 - DNA, 60 bp, Homo sapiens
  source 1..60: mol_type = genomic DNA
gcacatttatttgagctagcaacactcccaatccactttctcagcccaacaacaatagca

SEQ ID NO: 2064 - DNA, 60 bp, Homo sapiens
  source 1..60: mol_type = genomic DNA
ccattattttgccactgatctataaagccacatctgctcatacattaaacacacacacag

SEQ ID NO: 2065 - DNA, 60 bp, Homo sapiens
  source 1..60: mol_type = genomic DNA
caaaacagctctgaaatgttaataagagccaggagaaaatagacttccagctgtaaaaac

SEQ ID NO: 2066 - DNA, 60 bp, Homo sapiens
  source 1..60: mol_type = genomic DNA
cttccacacacagtggtaccacccgaagctctgcccgataggaggattggtaagggaggc

SEQ ID NO: 2067 - DNA, 60 bp, Homo sapiens
  source 1..60: mol_type = genomic DNA
tctgtggccagtgctgggtgacctgcatgggatcccaggcatgtgcctaggggccggagg

SEQ ID NO: 2068 - DNA, 60 bp, Homo sapiens
  source 1..60: mol_type = genomic DNA
agagggctgaggcggattctgaaatgctaaatcctaaagtgcagggacaaatctgtattt

SEQ ID NO: 2069 - DNA, 60 bp, Homo sapiens
  source 1..60: mol_type = genomic DNA
acattatcctctcctctgacctatgcatgcacgtgtgtacgctcccatgtccatgcattt

SEQ ID NO: 2070 - DNA, 60 bp, Homo sapiens
  source 1..60: mol_type = genomic DNA
aagtttcaagtagccaactgagatttcataatattataactacatctcacatagtatggg

SEQ ID NO: 2071 - DNA, 60 bp, Homo sapiens
  source 1..60: mol_type = genomic DNA
cctgtctctagtaacctaaggggctatgattgtgtctcccctcatgcatgcgcgcgcgcg

SEQ ID NO: 2072 - DNA, 60 bp, Homo sapiens
  source 1..60: mol_type = genomic DNA
aggaaattttgtttcctgttgttaataagctggagtgcaccacctcacccccctccccat

SEQ ID NO: 2073 - DNA, 60 bp, Homo sapiens
  source 1..60: mol_type = genomic DNA
taccaagtttgaattttgactttctttagaattctttataacagctcatggtttatattt

SEQ ID NO: 2074 - DNA, 60 bp, Homo sapiens
  source 1..60: mol_type = genomic DNA
acttccatatatatctttgcatatatatctattatttccttaaagcctgcccttttgagg

SEQ ID NO: 2075 - DNA, 60 bp, Homo sapiens
  source 1..60: mol_type = genomic DNA
taccattgtgcaaatgtggcataatttagcaaatcggagagggggtggatttagattcct

SEQ ID NO: 2076 - DNA, 60 bp, Homo sapiens
  source 1..60: mol_type = genomic DNA
attcaggaaaataagtacacatttccaattacctggccccttctactcacacatacaaat

SEQ ID NO: 2077 - DNA, 60 bp, Homo sapiens
  source 1..60: mol_type = genomic DNA
gaaacttaacagtgtcatcccccttcaatactaacgcacaccaaacacagacctctctct

SEQ ID NO: 2078 - DNA, 60 bp, Homo sapiens
  source 1..60: mol_type = genomic DNA
gttgaatagaacttcagataccttctgcctcaaatgttttataatgggaaaaccactgat

SEQ ID NO: 2079 - DNA, 60 bp, Homo sapiens
  source 1..60: mol_type = genomic DNA
tgtagcacccctgtgaggtactgagatgaagggagatcacacgacatatggaaatagcag

SEQ ID NO: 2080 - DNA, 60 bp, Homo sapiens
  source 1..60: mol_type = genomic DNA
actgagcatgcacaggacccattttcaatatttagcccatatacacccatgtgtgcatgt

SEQ ID NO: 2081 - DNA, 60 bp, Homo sapiens
  source 1..60: mol_type = genomic DNA
actctccctactcaccagctagttttcccgggatcactgcaagaacaacaacatcaacac

SEQ ID NO: 2082 - DNA, 60 bp, Homo sapiens
  source 1..60: mol_type = genomic DNA
gaactgttttctggaaaatttgggaatagctctgtcagtatactcatacggtgggaggga

SEQ ID NO: 2083 - DNA, 60 bp, Homo sapiens
  source 1..60: mol_type = genomic DNA
tgtgagactcaaaacaggattaccaagaactgaaatgtacaccggtgaggcacatcacgc

SEQ ID NO: 2084 - DNA, 60 bp, Homo sapiens
  source 1..60: mol_type = genomic DNA
actgtgcttggtgagtcactgaagcacctgcagatcccagcctgggtcccttgcagggag

SEQ ID NO: 2085 - DNA, 60 bp, Homo sapiens
  source 1..60: mol_type = genomic DNA
atccacagagcaagccataagtgaaaacaggaaattatgataagatctttagggctgctg

SEQ ID NO: 2086 - DNA, 60 bp, Homo sapiens
  source 1..60: mol_type = genomic DNA
tgtgctggtcctgcctggatccctagctatgggagacatctcccaccacacatacacatt

SEQ ID NO: 2087 - DNA, 60 bp, Homo sapiens
  source 1..60: mol_type = genomic DNA
ccaaggtggagagagatcctccattcctgtccacttgcctcaactcccagcataggttgg

SEQ ID NO: 2088 - DNA, 60 bp, Homo sapiens
  source 1..60: mol_type = genomic DNA
tctattccttgagtttcaaaggatagaattcaacctttcaagcagatatctttaagtcca

SEQ ID NO: 2089 - DNA, 60 bp, Homo sapiens
  source 1..60: mol_type = genomic DNA
agccttggaacccgccggcgaacacagactgcagcagcaggtgcacatagcaacaaataa

SEQ ID NO: 2090 - DNA, 60 bp, Homo sapiens
  source 1..60: mol_type = genomic DNA
atctagagtggatagaaaagggcaagttttttcagggccaacacagctcccttggtcctg

SEQ ID NO: 2091 - DNA, 60 bp, Homo sapiens
  source 1..60: mol_type = genomic DNA
ctaatgcagctttgtgagcaaacattgcctgtgatttaaatccaccaccgtaatgaaacg

SEQ ID NO: 2092 - DNA, 60 bp, Homo sapiens
  source 1..60: mol_type = genomic DNA
tcagggcaatgttacatccctcttccagaattaaacattcggagttgtctcccacacact

SEQ ID NO: 2093 - DNA, 60 bp, Homo sapiens
  source 1..60: mol_type = genomic DNA
gaaatccttcctgtgaatactactgagattagactgcctaactgagataatgctgattaa

SEQ ID NO: 2094 - DNA, 60 bp, Homo sapiens
  source 1..60: mol_type = genomic DNA
ggaagaaaatagagacaacacaaaatgccgtgcctccaaattaatcaacgtgctttttaa

SEQ ID NO: 2095 - DNA, 60 bp, Homo sapiens
  source 1..60: mol_type = genomic DNA
gaaacacacttatgcctcttaagaaagattgtaggaaaccaaagtaatcacaccgcacgt

SEQ ID NO: 2096 - DNA, 60 bp, Homo sapiens
  source 1..60: mol_type = genomic DNA
tttgaactatagttacaaagggcttgttcataacatatcatgcatataccacatatacag

SEQ ID NO: 2097 - DNA, 60 bp, Homo sapiens
  source 1..60: mol_type = genomic DNA
gatgagagaggtgactttagatggagaggtgactttagaagtcaaattggtgatgattat

SEQ ID NO: 2098 - DNA, 60 bp, Homo sapiens
  source 1..60: mol_type = genomic DNA
cacttcccagaacttggcttcctaccctcatccccctcttctcagcagcccatacccctg

SEQ ID NO: 2099 - DNA, 60 bp, Homo sapiens
  source 1..60: mol_type = genomic DNA
gatggggaggtcaagtccaaggtagggacctcagagagccttgtgtcaatgtagcatgca

SEQ ID NO: 2100 - DNA, 60 bp, Homo sapiens
  source 1..60: mol_type = genomic DNA
tcctgatggctgtgggaccactaggcaggaatcacttacaagttgtggacatctgtgaga

SEQ ID NO: 2101 - DNA, 60 bp, Homo sapiens
  source 1..60: mol_type = genomic DNA
ttcaatcctcttgtcaataaatggacacaggttactctccagggaggacacacccacacc

SEQ ID NO: 2102 - DNA, 60 bp, Homo sapiens
  source 1..60: mol_type = genomic DNA
ctcctctctcacagagcccagctgtgagtggatatctgtccaccatgtatagctggtgac

SEQ ID NO: 2103 - DNA, 60 bp, Homo sapiens
  source 1..60: mol_type = genomic DNA
tgttcaaggtactcagtaggagccacaggtgaattcaaccctcttcctgaccaccaccac

SEQ ID NO: 2104 - DNA, 60 bp, Homo sapiens
  source 1..60: mol_type = genomic DNA
taggagcttctcaatcttttctccttgccccacctacaagctcatatataaacatatcct

SEQ ID NO: 2105 - DNA, 60 bp, Homo sapiens
  source 1..60: mol_type = genomic DNA
agtgcagaaaccaaggttcgttcttctaaaattgcattcagaaacacgacggtcaagaag

SEQ ID NO: 2106 - DNA, 60 bp, Homo sapiens
  source 1..60: mol_type = genomic DNA
caggcaaaattatgacgaaaggggtagactggagcacgtaggatgtttttcgcttacagg

SEQ ID NO: 2107 - DNA, 60 bp, Homo sapiens
  source 1..60: mol_type = genomic DNA
cttcaatgcatgcagccacctctatccaaagcttctagatcttacaaccacattgtccct

SEQ ID NO: 2108 - DNA, 60 bp, Homo sapiens
  source 1..60: mol_type = genomic DNA
tagaatcagcctaggggtcagggaccaaggacccctcaccttgcaacacacagacacacg

SEQ ID NO: 2109 - DNA, 60 bp, Homo sapiens
  source 1..60: mol_type = genomic DNA
cctttttccccaagggttagcagcacacattcttcctactgtggctacatctgatgaaga

SEQ ID NO: 2110 - DNA, 60 bp, Homo sapiens
  source 1..60: mol_type = genomic DNA
gttttaacataatactaatggaatctccctgtcccatctcgttccccaactctgagtgtg

SEQ ID NO: 2111 - DNA, 60 bp, Homo sapiens
  source 1..60: mol_type = genomic DNA
gcattgtaaatggggtggccctttatcctacaaatcaccccgttttcatggtctatgtgt

SEQ ID NO: 2112 - DNA, 60 bp, Homo sapiens
  source 1..60: mol_type = genomic DNA
attcgcactttgttaataatccagagggctatctaaattctcacagggtcttactacaat

SEQ ID NO: 2113 - DNA, 60 bp, Homo sapiens
  source 1..60: mol_type = genomic DNA
aaaatcccactcagtttctagagttaacacctttccccactaatcagaacacaacacaca

SEQ ID NO: 2114 - DNA, 60 bp, Homo sapiens
  source 1..60: mol_type = genomic DNA
attataatagtacttatgcaagacttacacaatgtgataaactttatagagctacacgtg

SEQ ID NO: 2115 - DNA, 60 bp, Homo sapiens
  source 1..60: mol_type = genomic DNA
gtaccttgtaatactgaccttacttagtggttggaaagtccataaatgtagaagtgtaat

SEQ ID NO: 2116 - DNA, 60 bp, Homo sapiens
  source 1..60: mol_type = genomic DNA
cttgaacccgggttggtttggtggcttgttttccagaatgtgaattcctatcagtaattg

SEQ ID NO: 2117 - DNA, 60 bp, Homo sapiens
  source 1..60: mol_type = genomic DNA
tgaacgagcccacaggtctgcaggtggcggcctctgcccagcccctgcgaacctgcatct

SEQ ID NO: 2118 - DNA, 60 bp, Homo sapiens
  source 1..60: mol_type = genomic DNA
gtatccaggctgtcatgtttttcccttaacttcagtctcagcacatcatcgcatcaaaat

SEQ ID NO: 2119 - DNA, 60 bp, Homo sapiens
  source 1..60: mol_type = genomic DNA
atgttgctcctctttctcactcctcacctcatgaaatctttttatccaacctaggactgt

SEQ ID NO: 2120 - DNA, 60 bp, Homo sapiens
  source 1..60: mol_type = genomic DNA
cactgaagtattaagaccttcatgcaatcaatgcaggattacatagaaggatatatatat

SEQ ID NO: 2121 - DNA, 60 bp, Homo sapiens
  source 1..60: mol_type = genomic DNA
gatctgtggatatgagaaaaaatatttggctcttcagtggttaaccatcccctccctgca

SEQ ID NO: 2122 - DNA, 60 bp, Homo sapiens
  source 1..60: mol_type = genomic DNA
actaacaggtcatacactcaaagggttcctctcacttttaagtatggtatgttttgtgga

SEQ ID NO: 2123 - DNA, 60 bp, Homo sapiens
  source 1..60: mol_type = genomic DNA
gttgctttcttgatttatgcacatatgcaaatagaaatgtgaggcatgcatggaacacgt

SEQ ID NO: 2124 - DNA, 60 bp, Homo sapiens
  source 1..60: mol_type = genomic DNA
aaacatgtagtagatggactgataaccacaggtagagccccttggtaaaatgttaactgc

SEQ ID NO: 2125 - DNA, 60 bp, Homo sapiens
  source 1..60: mol_type = genomic DNA
tttgaacaccccagttctttccaaacacagcacctgtgcacacgcatgctcgcgcgcatg

SEQ ID NO: 2126 - DNA, 60 bp, Homo sapiens
  source 1..60: mol_type = genomic DNA
cttgcctaaatgtcatttctaagtgacattcccatcgttctctgccttagcaccctattt

SEQ ID NO: 2127 - DNA, 60 bp, Homo sapiens
  source 1..60: mol_type = genomic DNA
tggagaacagacatgtccatagcccttcatggcctccccagccagtcctcagcacccact

SEQ ID NO: 2128 - DNA, 60 bp, Homo sapiens
  source 1..60: mol_type = genomic DNA
aaagttatcctgtcattggcctttgtttgctagtctggattttgctagtctgcgcgcgcg

SEQ ID NO: 2129 - DNA, 60 bp, Homo sapiens
  source 1..60: mol_type = genomic DNA
tacctccctcagatcactaataccaattgctgtcacttgttttggggtgaatgcatgcgc

SEQ ID NO: 2130 - DNA, 60 bp, Homo sapiens
  source 1..60: mol_type = genomic DNA
agaatgtttcagagtgaaaatgagattggagactattggggactaacttggattgggcat

SEQ ID NO: 2131 - DNA, 60 bp, Homo sapiens
  source 1..60: mol_type = genomic DNA
gggtttccaaactccaatttccttgacataataaactaatgctaaaaagggatctgatct

SEQ ID NO: 2132 - DNA, 60 bp, Homo sapiens
  source 1..60: mol_type = genomic DNA
aatgaaaattctgagtaattgaatagttttgatatttagtacacgtgtatgaccatgtct

SEQ ID NO: 2133 - DNA, 60 bp, Homo sapiens
  source 1..60: mol_type = genomic DNA
aaaagctggggaaaattacataaactgcaatttgaagtaatttgttgccaagtacaatct

SEQ ID NO: 2134 - DNA, 60 bp, Homo sapiens
  source 1..60: mol_type = genomic DNA
ctcagattgttctttacctaatgattcctcagaaaattgtattgtcctggccaaaaaaca

SEQ ID NO: 2135 - DNA, 60 bp, Homo sapiens
  source 1..60: mol_type = genomic DNA
aaagggcaaaataagctatcatgtaaagtctagccaagagagctcacaaattagtagaga

SEQ ID NO: 2136 - DNA, 60 bp, Homo sapiens
  source 1..60: mol_type = genomic DNA
agacaaaatataaagtttaaaggcgcaagtggacttattttgctccaaagacatggctca

SEQ ID NO: 2137 - DNA, 60 bp, Homo sapiens
  source 1..60: mol_type = genomic DNA
aatgactgttcaacctaatcaggaagcatattctagtattataaaagtttcttagagcat

SEQ ID NO: 2138 - DNA, 60 bp, Homo sapiens
  source 1..60: mol_type = genomic DNA
cggtgtcctaagcacttttgaatgggaagctgacattgcaaaactggaagatttcacttt

SEQ ID NO: 2139 - DNA, 60 bp, Homo sapiens
  source 1..60: mol_type = genomic DNA
atctccaatgacaaaaaagctaactgtatttttaaagcagattataatgctagaaacagg

SEQ ID NO: 2140 - DNA, 60 bp, Homo sapiens
  source 1..60: mol_type = genomic DNA
gctgggcccagagcagggaatctcctgggaccgtgtcattggccacacgcagacacgtgt

SEQ ID NO: 2141 - DNA, 60 bp, Homo sapiens
  source 1..60: mol_type = genomic DNA
gactggacacacaaaggcatgacgcacaaacaacaggtgaacaagcaacacaacacccag

SEQ ID NO: 2142 - DNA, 60 bp, Homo sapiens
  source 1..60: mol_type = genomic DNA
tacatgatcagttgatttgggaggggaaattgcatgcacacacatgagagcttgcacacc

SEQ ID NO: 2143 - DNA, 60 bp, Homo sapiens
  source 1..60: mol_type = genomic DNA
aagaagaagaagaccatcgtgactgggccagcaaagcctctgctccattggttccattca

SEQ ID NO: 2144 - DNA, 60 bp, Homo sapiens
  source 1..60: mol_type = genomic DNA
gggggagtgggaggaaaaggatggtgccccctagacatgcgtagaggcacactcacccag

SEQ ID NO: 2145 - DNA, 60 bp, Homo sapiens
  source 1..60: mol_type = genomic DNA
cttattcactcgtcttaccattctgctgagacacatggcggcctggccacattgcatgtg

SEQ ID NO: 2146 - DNA, 60 bp, Homo sapiens
  source 1..60: mol_type = genomic DNA
atctgtctccacaccccaaagcaggcctccaggctgtagcagatgacacacacatacatg

SEQ ID NO: 2147 - DNA, 60 bp, Homo sapiens
  source 1..60: mol_type = genomic DNA
cgttgaaaagaagttcagttcctgccatcacggcttctccacttggaccgtccgccctgc

SEQ ID NO: 2148 - DNA, 60 bp, Homo sapiens
  source 1..60: mol_type = genomic DNA
atttggaatagataaattaattcaggaagacccaccttcacagaaggtcggggtaaccag

SEQ ID NO: 2149 - DNA, 60 bp, Homo sapiens
  source 1..60: mol_type = genomic DNA
ctctgtgcttttacaagcctttacaggtagcctgcaggagagaggatgttatcatggagc

SEQ ID NO: 2150 - DNA, 60 bp, Homo sapiens
  source 1..60: mol_type = genomic DNA
atatgtcataaactttgatcatctagggagttttgaggccttcctatttcatattaggaa

SEQ ID NO: 2151 - DNA, 60 bp, Homo sapiens
  source 1..60: mol_type = genomic DNA
taacccagcttcatacacgctgtttctatcttgtgtctatttctggggaaacacacacaa

SEQ ID NO: 2152 - DNA, 60 bp, Homo sapiens
  source 1..60: mol_type = genomic DNA
atgctttagttatgggtcagtaagaaggtaccagaagccagaaggacatctgatctacct

SEQ ID NO: 2153 - DNA, 60 bp, Homo sapiens
  source 1..60: mol_type = genomic DNA
tgttgcagtcagcaggccctgggtgaacagacccagtccccaccacaccactgcccctac

SEQ ID NO: 2154 - DNA, 60 bp, Homo sapiens
  source 1..60: mol_type = genomic DNA
ttcagacaggaccctatcttctgggtaaaagaaggacagtaatgtccctcctacccccac

SEQ ID NO: 2155 - DNA, 60 bp, Homo sapiens
  source 1..60: mol_type = genomic DNA
tgggtatttccattgttaatatgtagtattaagtcagtcacatagacacacacgtgcgcg

SEQ ID NO: 2156 - DNA, 60 bp, Homo sapiens
  source 1..60: mol_type = genomic DNA
gtggtgggcaggaactctccttccatctgtagactggttcttagatgtggctcagaactg

SEQ ID NO: 2157 - DNA, 60 bp, Homo sapiens
  source 1..60: mol_type = genomic DNA
gctcatcctatgaaaagaaccaccaccaaatgctgcacatggctgtgccagctcagaaat

SEQ ID NO: 2158 - DNA, 60 bp, Homo sapiens
  source 1..60: mol_type = genomic DNA
taggctgaatcccacctcctacatgcccaggacacaatcatgcccacccacgctcacgtg

SEQ ID NO: 2159 - DNA, 60 bp, Homo sapiens
  source 1..60: mol_type = genomic DNA
aatacttgagcaagtaaaaatatatctgctctggctgaagtgaaggcaaagggattggag

SEQ ID NO: 2160 - DNA, 60 bp, Homo sapiens
  source 1..60: mol_type = genomic DNA
ctgcagggtggaggagggcctaacactgcctttgagaaactaaggaaaacttactggaaa

SEQ ID NO: 2161 - DNA, 60 bp, Homo sapiens
  source 1..60: mol_type = genomic DNA
caacaaggctcagagctcaggatgtagcccaaatgcagagccagggaacccagagacacc

SEQ ID NO: 2162 - DNA, 60 bp, Homo sapiens
  source 1..60: mol_type = genomic DNA
actaggtataatataggagtgatcttcaccccagggatctttgttaggtattgattaagt

SEQ ID NO: 2163 - DNA, 60 bp, Homo sapiens
  source 1..60: mol_type = genomic DNA
aggagaaagactagaggaaatttgcttttaaaggcagagccctacggacatttatgttca

SEQ ID NO: 2164 - DNA, 60 bp, Homo sapiens
  source 1..60: mol_type = genomic DNA
actctctcagtgcccctttgaaagttcgtgaggcatttaaaacataagccccatttaaaa

SEQ ID NO: 2165 - DNA, 60 bp, Homo sapiens
  source 1..60: mol_type = genomic DNA
ttgagaagccctgcttttgactgaatgacttgaaagcataaaaaaagatgcgcgcgcgcg

SEQ ID NO: 2166 - DNA, 60 bp, Homo sapiens
  source 1..60: mol_type = genomic DNA
aggtgcatccaccctacaatccagaacatggcaacactgctaaagccttggctgtgcctg

SEQ ID NO: 2167 - DNA, 60 bp, Homo sapiens
  source 1..60: mol_type = genomic DNA
tttttctacctcctttctacacctttcctaggatgtcctgtgctctgattgtaaacacat

SEQ ID NO: 2168 - DNA, 60 bp, Homo sapiens
  source 1..60: mol_type = genomic DNA
ttgcctgatatcctgatagcatgagtcacattgttccaacacatagtcagcacagaaatg

SEQ ID NO: 2169 - DNA, 60 bp, Homo sapiens
  source 1..60: mol_type = genomic DNA
agccagggtgctttgtaagaaaaaggggaagtgctaggcaactacacacgtgtgtgcgcg

SEQ ID NO: 2170 - DNA, 60 bp, Homo sapiens
  source 1..60: mol_type = genomic DNA
tgagagcagaggccccgtctggtttttctcactgacgtctgcaccccctacacaccacat

SEQ ID NO: 2171 - DNA, 60 bp, Homo sapiens
  source 1..60: mol_type = genomic DNA
tttagtggctttttcaatcctctgctctctctacaccaattcccttaccaaattgccaag

SEQ ID NO: 2172 - DNA, 60 bp, Homo sapiens
  source 1..60: mol_type = genomic DNA
ctggccacttccaaattagcctatgaatgtgtttgagtatgtctcatctaatacacacaa

SEQ ID NO: 2173 - DNA, 60 bp, Homo sapiens
  source 1..60: mol_type = genomic DNA
atttctgccattcttctcctcccgccttacttccttcccattgcttaaacacaaacacac

SEQ ID NO: 2174 - DNA, 60 bp, Homo sapiens
  source 1..60: mol_type = genomic DNA
tcacaagttgatgacttgttatgatttaagatctccccaaagatgccccatacaatgctt

SEQ ID NO: 2175 - DNA, 60 bp, Homo sapiens
  source 1..60: mol_type = genomic DNA
agatctccaactcccagagccattccttctggttttgttctgcagagagcaggaggctgg

SEQ ID NO: 2176 - DNA, 60 bp, Homo sapiens
  source 1..60: mol_type = genomic DNA
tgggtaattggtatcagaagtcatcacagtcctacaaaatacactgaatttctatgtaac

SEQ ID NO: 2177 - DNA, 60 bp, Homo sapiens
  source 1..60: mol_type = genomic DNA
tatcactagctagtccagtattctagacagcgtatgtgtgtctgtctgtccatcatgcgt

SEQ ID NO: 2178 - DNA, 60 bp, Homo sapiens
  source 1..60: mol_type = genomic DNA
ttgaatgaccacagtgagccatctacatgtttccacccattcgttttatacacattcatg

SEQ ID NO: 2179 - DNA, 60 bp, Homo sapiens
  source 1..60: mol_type = genomic DNA
tatacctaaaatctaaacaaaattgaaaatactccccaaaggggaaaaactgcacttgtg

SEQ ID NO: 2180 - DNA, 60 bp, Homo sapiens
  source 1..60: mol_type = genomic DNA
caagtccacaaccttgaagcatggctgaccccaccctcttctgtggcctccttgtctttt

SEQ ID NO: 2181 - DNA, 60 bp, Homo sapiens
  source 1..60: mol_type = genomic DNA
tgagggaaaaaggcatatgtataacatgaagttactacacacaggtaagcacccccctcc

SEQ ID NO: 2182 - DNA, 60 bp, Homo sapiens
  source 1..60: mol_type = genomic DNA
aaaagaagttaggggtcttaggggcttctaagaaggcagacatacaatattattatttgt

SEQ ID NO: 2183 - DNA, 60 bp, Homo sapiens
  source 1..60: mol_type = genomic DNA
tgacttgggtgtacacattaacattcacatacatacaggggcctcctgccacacacaact

SEQ ID NO: 2184 - DNA, 60 bp, Homo sapiens
  source 1..60: mol_type = genomic DNA
gaaaatttttatctgtaatacatcagcttaagtctatggagtcacaccatttgtgcaagt

SEQ ID NO: 2185 - DNA, 60 bp, Homo sapiens
  source 1..60: mol_type = genomic DNA
cccactcagtgatgtgcctcaaacccctacctccgtcctggcttcctctttcagctccct

SEQ ID NO: 2186 - DNA, 60 bp, Homo sapiens
  source 1..60: mol_type = genomic DNA
tcacagcctttatcctgcttttagtcctcggcctcatcggtggcaaagcattcagacact

SEQ ID NO: 2187 - DNA, 60 bp, Homo sapiens
  source 1..60: mol_type = genomic DNA
tgacacaagaaatctggggtacaatcattggcacttgatcccatcttaagacagcaatat

SEQ ID NO: 2188 - DNA, 60 bp, Homo sapiens
  source 1..60: mol_type = genomic DNA
ttcataaatcatcagaaaaatgctagcatactctcagtgagataagagatgaaaaaagaa

SEQ ID NO: 2189 - DNA, 60 bp, Homo sapiens
  source 1..60: mol_type = genomic DNA
ttttaatatgcatttcaaagctgcaagtattatgtttgagcaaaaaaacaccattagaca

SEQ ID NO: 2190 - DNA, 60 bp, Homo sapiens
  source 1..60: mol_type = genomic DNA
tctttttgtggcctttagattgaccatgtcttagaaggacaagaatacgcacacacacag

SEQ ID NO: 2191 - DNA, 60 bp, Homo sapiens
  source 1..60: mol_type = genomic DNA
ttcctgagcctttccgagtttctgtggaacacgcaaccttcttcttgtctaaaactacat

SEQ ID NO: 2192 - DNA, 60 bp, Homo sapiens
  source 1..60: mol_type = genomic DNA
acttactagggtatggtaaatgccttctacatagttatcctgtgcaacatgggtgtcctg

SEQ ID NO: 2193 - DNA, 60 bp, Homo sapiens
  source 1..60: mol_type = genomic DNA
agtacaatcattcctactctcccatctttccccaaccctatgtaccatgagagtgagtat

SEQ ID NO: 2194 - DNA, 60 bp, Homo sapiens
  source 1..60: mol_type = genomic DNA
gaatagtctaatcttaaaatgcctgtatctttgtatctcctatttcagaggtaaaaatgg

SEQ ID NO: 2195 - DNA, 60 bp, Homo sapiens
  source 1..60: mol_type = genomic DNA
atttttctttcattcatagtttattgagcataaattagtctcctcctgtactcaaatcct

SEQ ID NO: 2196 - DNA, 60 bp, Homo sapiens
  source 1..60: mol_type = genomic DNA
gagcatagatttggtaagtgactagacacacaaataacactcatctatcgtggccagtct

SEQ ID NO: 2197 - DNA, 60 bp, Homo sapiens
  source 1..60: mol_type = genomic DNA
ggaatgtaattgtaatctattttccacccctcaatagtagcgggtgaaacacacacacag

SEQ ID NO: 2198 - DNA, 60 bp, Homo sapiens
  source 1..60: mol_type = genomic DNA
tttccccagtaatccttgctcactctctccctcttctaccttcaaatatgtgcatgcatg

SEQ ID NO: 2199 - DNA, 60 bp, Homo sapiens
  source 1..60: mol_type = genomic DNA
ttcatttctcagatatcagtggggtaatcatgtcctgcgtctcccacccctttcacatct

SEQ ID NO: 2200 - DNA, 60 bp, Homo sapiens
  source 1..60: mol_type = genomic DNA
tctcttgcgcttgctttgttgctgaggcagccctgtggggtctcccagtggctgataaca

SEQ ID NO: 2201 - DNA, 60 bp, Homo sapiens
  source 1..60: mol_type = genomic DNA
tagcctaagccctcagtcacttagattgtaatgcacaaactttacatgcacacacacatg

SEQ ID NO: 2202 - DNA, 60 bp, Homo sapiens
  source 1..60: mol_type = genomic DNA
atttctctcccctccaactcttcttcaacttggttgatgatgtcaccacccactgagtct

SEQ ID NO: 2203 - DNA, 60 bp, Homo sapiens
  source 1..60: mol_type = genomic DNA
aagggcaaaggtcagtttttcaactgtcagtgtaaaagggactaagaatacaccaccccc

SEQ ID NO: 2204 - DNA, 60 bp, Homo sapiens
  source 1..60: mol_type = genomic DNA
agacacagtattaaaaactggaaatgtcttcacttcgaatttagtattttatcactaata

SEQ ID NO: 2205 - DNA, 60 bp, Homo sapiens
  source 1..60: mol_type = genomic DNA
agtgctgcggttttaggcaccagacatagccatccccgcatgcctccctacacacacacg

SEQ ID NO: 2206 - DNA, 60 bp, Homo sapiens
  source 1..60: mol_type = genomic DNA
ttgaattaagatttcaagagctgtagccatgtggtcaacagatgtgtaccaggtgcaata

SEQ ID NO: 2207 - DNA, 60 bp, Homo sapiens
  source 1..60: mol_type = genomic DNA
ataatgacagacatgcacaaaccaaagcaattcacttgtttaatattacacgagcacatg

SEQ ID NO: 2208 - DNA, 60 bp, Homo sapiens
  source 1..60: mol_type = genomic DNA
caatttggcaattgaaaattggaacaatgccaccatgaagtgacttttgaatgttatgat

SEQ ID NO: 2209 - DNA, 60 bp, Homo sapiens
  source 1..60: mol_type = genomic DNA
tgagttgatattgcttattcatggcccatggaattaaattgtagggcaagcttgctaaca

SEQ ID NO: 2210 - DNA, 60 bp, Homo sapiens
  source 1..60: mol_type = genomic DNA
gaggttggatgagattgcaaggggtcatccataccctcattgcttggccttttcgtttat

SEQ ID NO: 2211 - DNA, 60 bp, Homo sapiens
  source 1..60: mol_type = genomic DNA
ctgaccttcatcttcactccattcctggccaggatgtttctacagctaccacatacacat

SEQ ID NO: 2212 - DNA, 60 bp, Homo sapiens
  source 1..60: mol_type = genomic DNA
gccttccctgctgaagcctgacaagaacatctctactgagtcagaaacggccctccacat

SEQ ID NO: 2213 - DNA, 60 bp, Homo sapiens
  source 1..60: mol_type = genomic DNA
tttacccacaggtatggacggacacacagatgggctggctcaggctgaaacacttcacat

SEQ ID NO: 2214 - DNA, 60 bp, Homo sapiens
  source 1..60: mol_type = genomic DNA
ctcatctcttcttccaacttcctcttttgtcctcattccaacaaccagcccaaacacata

SEQ ID NO: 2215 - DNA, 60 bp, Homo sapiens
  source 1..60: mol_type = genomic DNA
taaaaatattccccaaatattacttgtaattgcaggcaaaaggaactctctttcttgtat

SEQ ID NO: 2216 - DNA, 60 bp, Homo sapiens
  source 1..60: mol_type = genomic DNA
tttattggaaccaaagacactatacacatgcgctcatgcgtgcgcacacacacgtgcgcg

SEQ ID NO: 2217 - DNA, 60 bp, Homo sapiens
  source 1..60: mol_type = genomic DNA
aactatttatcacatatgaaagaccacaaaacaataatacttattttttacggagaacag

SEQ ID NO: 2218 - DNA, 60 bp, Homo sapiens
  source 1..60: mol_type = genomic DNA
ccgcatgcacataatattctcaccatcacaacacagttaagtatgcttgcacacgtgtgt

SEQ ID NO: 2219 - DNA, 60 bp, Homo sapiens
  source 1..60: mol_type = genomic DNA
tggagatggaaagatatggtcagtattttaatactagtttacatttgtgtgacatgaggg

SEQ ID NO: 2220 - DNA, 60 bp, Homo sapiens
  source 1..60: mol_type = genomic DNA
gagatgctgatgggactccaggggaagtgtttgtgccctctgcatgcattcccatgtgcg

SEQ ID NO: 2221 - DNA, 60 bp, Homo sapiens
  source 1..60: mol_type = genomic DNA
cttctttcattatggttttggaagatgacagaaagcaaaaggtgagaggaaaaggcaaat

SEQ ID NO: 2222 - DNA, 60 bp, Homo sapiens
  source 1..60: mol_type = genomic DNA
gattatcaatggaactgctggcatgtggggctttcttagggcatatcataccctccttaa

SEQ ID NO: 2223 - DNA, 60 bp, Homo sapiens
  source 1..60: mol_type = genomic DNA
cggtagggaagggactcccagagccctgaacttcagggaggacacaccaacacacgaagg

SEQ ID NO: 2224 - DNA, 60 bp, Homo sapiens
  source 1..60: mol_type = genomic DNA
gctgagtctgactcactgcagggctgtgaggacaacagatggcccagaagagaacaaatg

SEQ ID NO: 2225 - DNA, 60 bp, Homo sapiens
  source 1..60: mol_type = genomic DNA
gaaaacttacatagtgtgtacacagtagagtcaactcaggcacagattggtaactgctca

SEQ ID NO: 2226 - DNA, 60 bp, Homo sapiens
  source 1..60: mol_type = genomic DNA
gaggtgttatcaatctgtttttaaagccagggactttgcccaggggaaaaatgcatgcat

SEQ ID NO: 2227 - DNA, 60 bp, Homo sapiens
  source 1..60: mol_type = genomic DNA
agtattcagcacagtcttgatgtcaggagtttacagcccagctgggaagctaacttccag

SEQ ID NO: 2228 - DNA, 60 bp, Homo sapiens
  source 1..60: mol_type = genomic DNA
tacaacctcagtgcactatattatgtgacataaatgttattgcaattaagcctgctagga

SEQ ID NO: 2229 - DNA, 60 bp, Homo sapiens
  source 1..60: mol_type = genomic DNA
ctttttcaagatgctaaataattctgagtcagaaatagtattacttagaatccctacacg

SEQ ID NO: 2230 - DNA, 60 bp, Homo sapiens
  source 1..60: mol_type = genomic DNA
tagggggagcatggctcagcttgttatctccatagggcactgtgcatggagcttccccag

SEQ ID NO: 2231 - DNA, 60 bp, Homo sapiens
  source 1..60: mol_type = genomic DNA
tggctcagccacacttcattccccatagttcccgctccctacaggtgcacacacatgtgt

SEQ ID NO: 2232 - DNA, 60 bp, Homo sapiens
  source 1..60: mol_type = genomic DNA
caggccaatgacatgtaaagatgtaaagatgctaccctatcctgtccccaagttacacat

SEQ ID NO: 2233 - DNA, 60 bp, Homo sapiens
  source 1..60: mol_type = genomic DNA
aacttgcgtggaaaaatgctttagttaaaagaagcagtaaagattcctttaaagtgttag

SEQ ID NO: 2234 - DNA, 60 bp, Homo sapiens
  source 1..60: mol_type = genomic DNA
aggcctccttcctgccttacccaggacagcccagttgcagctgggttggtcccacagtcc

SEQ ID NO: 2235 - DNA, 60 bp, Homo sapiens
  source 1..60: mol_type = genomic DNA
ggcatcagtcccaaatctggaagaatttagcaacttcattgtgcaccaaattcagtggaa

SEQ ID NO: 2236 - DNA, 60 bp, Homo sapiens
  source 1..60: mol_type = genomic DNA
aaagaaagtaacacttgcttttcttacacgagaaggaggggactgaaaatccctctctct

SEQ ID NO: 2237 - DNA, 60 bp, Homo sapiens
  source 1..60: mol_type = genomic DNA
actgtgcctggcctccacatgactttctactagttgattttaaactgggcatatgcattt

SEQ ID NO: 2238 - DNA, 60 bp, Homo sapiens
  source 1..60: mol_type = genomic DNA
tctcttacataggacttatttctacccgtgtcttttccaaaatcaacctcacacgtgtga

SEQ ID NO: 2239 - DNA, 60 bp, Homo sapiens
  source 1..60: mol_type = genomic DNA
ctgatccccgtaatcaagcccaatatttctgcagtgcaacctagcctcaaatgtcactat

SEQ ID NO: 2240 - DNA, 60 bp, Homo sapiens
  source 1..60: mol_type = genomic DNA
cagagattttctttaggcaatcttttttcaagaaagagatagatatgtgcaagcttacag

SEQ ID NO: 2241 - DNA, 60 bp, Homo sapiens
  source 1..60: mol_type = genomic DNA
taacaccagagagattaagttcaatgaccatagtatacgctactgttttaaagcaaggtt

SEQ ID NO: 2242 - DNA, 60 bp, Homo sapiens
  source 1..60: mol_type = genomic DNA
caaggatctgtgagagtattgaaactagtcccccctgtggataccaaagaatgacttcag

SEQ ID NO: 2243 - DNA, 60 bp, Homo sapiens
  source 1..60: mol_type = genomic DNA
atgaacacgcatgtgttacatgctcacatagtcacacacatgctcgcatgcgtgcgcgtg

SEQ ID NO: 2244 - DNA, 60 bp, Homo sapiens
  source 1..60: mol_type = genomic DNA
gaggtggacaaaacctgctatcaataacaaaacgaaaagctgagtagagtatgcacacat

SEQ ID NO: 2245 - DNA, 60 bp, Homo sapiens
  source 1..60: mol_type = genomic DNA
gcagacgttgtgtactcggctcccccaagcacatcctttcgccgtacacgcgcgcgcgcg

SEQ ID NO: 2246 - DNA, 60 bp, Homo sapiens
  source 1..60: mol_type = genomic DNA
tcttagtcagatcccacagtttgacccaaaaggccaaatcctctaagcaatcccttttaa

SEQ ID NO: 2247 - DNA, 60 bp, Homo sapiens
  source 1..60: mol_type = genomic DNA
acccacacagcctaatgagccacgtaaagttgactagacagatcgtcaaatgcagatgat

SEQ ID NO: 2248 - DNA, 60 bp, Homo sapiens
  source 1..60: mol_type = genomic DNA
tggtgccagagggtttcagacatgaatcagatccagcacctcatagagccttaactctgg

SEQ ID NO: 2249 - DNA, 60 bp, Homo sapiens
  source 1..60: mol_type = genomic DNA
ttgcattgattgagactttggacactccaaattgaactccaccatcaacacacatccaca

SEQ ID NO: 2250 - DNA, 60 bp, Homo sapiens
  source 1..60: mol_type = genomic DNA
aaactgaacaggctgcacaggaattaacctaagaggtagctgtgtctgcttttatcactg

SEQ ID NO: 2251 - DNA, 60 bp, Homo sapiens
  source 1..60: mol_type = genomic DNA
tgaacaggtcagtagctctcgagcattctatctgtgacccatttcacagtgcaatccata

SEQ ID NO: 2252 - DNA, 60 bp, Homo sapiens
  source 1..60: mol_type = genomic DNA
tcgggatggggagggcagccaggggggccttggcttggagacatggaccccgggcctctg

SEQ ID NO: 2253 - DNA, 60 bp, Homo sapiens
  source 1..60: mol_type = genomic DNA
atatttgctgacggcctccctcccccacacgtgtgagtgcacgtgcatgcgcatgcatgt

SEQ ID NO: 2254 - DNA, 60 bp, Homo sapiens
  source 1..60: mol_type = genomic DNA
cccaaaaaaagattacactttgatccttctgcccttagacaaatgcactaaacctgaatt

SEQ ID NO: 2255 - DNA, 60 bp, Homo sapiens
  source 1..60: mol_type = genomic DNA
ggctggctggtctactccaatgctatgcctaagcctttagtaggaattttaccacctgaa

SEQ ID NO: 2256 - DNA, 60 bp, Homo sapiens
  source 1..60: mol_type = genomic DNA
tgctattgcccgaaaaggaggagggtcaggaagtatgagaggggatagctaagcaggaat

SEQ ID NO: 2257 - DNA, 60 bp, Homo sapiens
  source 1..60: mol_type = genomic DNA
tagtatatacatttgttctcctgggtcttattatcacaggggaaccagagaagcataaat

SEQ ID NO: 2258 - DNA, 60 bp, Homo sapiens
  source 1..60: mol_type = genomic DNA
tctcccagtacctagttcagcacctggaagatggtcgatataagaaacaaccctaactac

SEQ ID NO: 2259 - DNA, 60 bp, Homo sapiens
  source 1..60: mol_type = genomic DNA
aatttaacaaaacaatgaaaccatttgagaggccaagttaggatcttagtgttattagat

SEQ ID NO: 2260 - DNA, 60 bp, Homo sapiens
  source 1..60: mol_type = genomic DNA
cttctaaataaacgtaacttcaaaccacagtagcacacgagaatctttatcatctttcat

SEQ ID NO: 2261 - DNA, 60 bp, Homo sapiens
  source 1..60: mol_type = genomic DNA
tgctgagaaacagggcatggccccttgagaccagaagctctcatcttccaaggaggaatg

SEQ ID NO: 2262 - DNA, 60 bp, Homo sapiens
  source 1..60: mol_type = genomic DNA
gagtaatgtgatcaactttaataatgtctcaaggggcttctatctcacgagtcattttca

SEQ ID NO: 2263 - DNA, 60 bp, Homo sapiens
  source 1..60: mol_type = genomic DNA
ggcagcagagtttaaatgtgactgatatctctgtttctggtgcatggccaacaacgataa

SEQ ID NO: 2264 - DNA, 60 bp, Homo sapiens
  source 1..60: mol_type = genomic DNA
ggactcctaggtacatgaaattgaatgatccctgctgctttcaagtctaagtggagagaa

SEQ ID NO: 2265 - DNA, 60 bp, Homo sapiens
  source 1..60: mol_type = genomic DNA
tatataccctggtaagaatagagagaagttccaataaggattgtgtacctcagtagagtg

SEQ ID NO: 2266 - DNA, 60 bp, Homo sapiens
  source 1..60: mol_type = genomic DNA
caatcttctctactctgggctatagaagaggctggtctatatttcaaaacactaatgtat

SEQ ID NO: 2267 - DNA, 60 bp, Homo sapiens
  source 1..60: mol_type = genomic DNA
cctaacgttttcatagcactcatttgagagaataactgagaggctttcaggttattttga

SEQ ID NO: 2268 - DNA, 60 bp, Homo sapiens
  source 1..60: mol_type = genomic DNA
gtggcatttagttacccattcgtattgatgaagaaaaagctagatacattagagtttcat

SEQ ID NO: 2269 - DNA, 60 bp, Homo sapiens
  source 1..60: mol_type = genomic DNA
ctattctggcctctacatatgcaaactaacctcacacccttccttatactcactcccaag

SEQ ID NO: 2270 - DNA, 60 bp, Homo sapiens
  source 1..60: mol_type = genomic DNA
ctgtctattaaaagtacctgggtaattctgactaaaagttttatctgataacacacaggg

SEQ ID NO: 2271 - DNA, 60 bp, Homo sapiens
  source 1..60: mol_type = genomic DNA
atggaactgaatgtgttgcttaaaatgattttggggatgatcaattatacgccccccaca

SEQ ID NO: 2272 - DNA, 60 bp, Homo sapiens
  source 1..60: mol_type = genomic DNA
cagaagttctaactcttacagtgagccaaaagtctgttaaaatagtaacaaggaaggtgt

SEQ ID NO: 2273 - DNA, 60 bp, Homo sapiens
  source 1..60: mol_type = genomic DNA
tctctcaaacttccaagggcagaaaatccccaagtaacaagtttattccagggcgcgcgg

SEQ ID NO: 2274 - DNA, 60 bp, Homo sapiens
  source 1..60: mol_type = genomic DNA
attgggtcaaaatctcattgcatctttaagcctttcccctctcccacagacacattgcat

SEQ ID NO: 2275 - DNA, 60 bp, Homo sapiens
  source 1..60: mol_type = genomic DNA
tgcgatgtatgctgagcaccttccagagcgctctgcatttccatggggagggtgcttgtg

SEQ ID NO: 2276 - DNA, 60 bp, Homo sapiens
  source 1..60: mol_type = genomic DNA
tgttctctcacagctcaaactgatacaccaaagtgttgttttgcacaacagtacacacat

SEQ ID NO: 2277 - DNA, 60 bp, Homo sapiens
  source 1..60: mol_type = genomic DNA
agtgcgcccactagacgaaagaagaccaactaagccttcgtgtagtgcgtagacaggccg

SEQ ID NO: 2278 - DNA, 60 bp, Homo sapiens
  source 1..60: mol_type = genomic DNA
atgtcttcataacaactggtgccacttttatgatgactaaagtctaaattttaaccccct

SEQ ID NO: 2279 - DNA, 60 bp, Homo sapiens
  source 1..60: mol_type = genomic DNA
ttaaggatttgtatagatgaccttttagcaatttttcatttgagaattatggaactacaa

SEQ ID NO: 2280 - DNA, 60 bp, Homo sapiens
  source 1..60: mol_type = genomic DNA
ctttttggccccactgcctcattacattaggccatatcagtgctcatacatacagctcat

SEQ ID NO: 2281 - DNA, 60 bp, Homo sapiens
  source 1..60: mol_type = genomic DNA
acctccggagacttgattcactttgtataaatgtagctctgtattatttgagatagtgat

SEQ ID NO: 2282 - DNA, 60 bp, Homo sapiens
  source 1..60: mol_type = genomic DNA
atcctccaatggttttccactccactaaactctatcttgacccacagaccctgtatcatt

SEQ ID NO: 2283 - DNA, 60 bp, Homo sapiens
  source 1..60: mol_type = genomic DNA
accggattcaggtgaatgcttaagtatacctcctctgctctgcaagggagctcttgggaa

SEQ ID NO: 2284 - DNA, 60 bp, Homo sapiens
  source 1..60: mol_type = genomic DNA
tgaaggaaaagttactgaccttaggggtcttgaaagcgagaaaatgattaagtgctgtat

SEQ ID NO: 2285 - DNA, 60 bp, Homo sapiens
  source 1..60: mol_type = genomic DNA
ttaagacctgactaatcaaatactgtcatacaggaagagatggcaaaaacattgtaagta

SEQ ID NO: 2286 - DNA, 60 bp, Homo sapiens
  source 1..60: mol_type = genomic DNA
attacatgtcatataattaggataaaaaatgtctccatatctcttatacacactcacgtg

SEQ ID NO: 2287 - DNA, 60 bp, Homo sapiens
  source 1..60: mol_type = genomic DNA
acaatactgcgtccttggagcaagcctccctagactctccagcatacatacacacacgtg

SEQ ID NO: 2288 - DNA, 60 bp, Homo sapiens
  source 1..60: mol_type = genomic DNA
ttaaatcttaccaagaggggcttttgcccagagctctgtgctttaaagtatccagtaaag

SEQ ID NO: 2289 - DNA, 60 bp, Homo sapiens
  source 1..60: mol_type = genomic DNA
cttcagtgtcaattttactgtcagcttggcctataatcaagttcttgaggaaacacacat

SEQ ID NO: 2290 - DNA, 60 bp, Homo sapiens
  source 1..60: mol_type = genomic DNA
ttttgttcgccttttgatttctgcaggctaagtatgttccaacctataatccctcttcct

SEQ ID NO: 2291 - DNA, 60 bp, Homo sapiens
  source 1..60: mol_type = genomic DNA
aatatggagaatgtttcagcatgtgctggccctcggtctgggatttcttttcagtctcca

SEQ ID NO: 2292 - DNA, 60 bp, Homo sapiens
  source 1..60: mol_type = genomic DNA
tcttacattctctggacttcaataattacagtgatagacacatttattgttcaatccgga

SEQ ID NO: 2293 - DNA, 60 bp, Homo sapiens
  source 1..60: mol_type = genomic DNA
tctgttggtcactatatttctcaaacttttgttgtagtgatttagcctatattgtttcat

SEQ ID NO: 2294 - DNA, 60 bp, Homo sapiens
  source 1..60: mol_type = genomic DNA
gtctctgcagttggatatctgtgtgcttggaagtccaaggaagctgctttctcactttgt

SEQ ID NO: 2295 - DNA, 60 bp, Homo sapiens
  source 1..60: mol_type = genomic DNA
tgaagttacaaacgaacccagacctagaacaactacacatgagattgacctcaccccaaa

SEQ ID NO: 2296 - DNA, 60 bp, Homo sapiens
  source 1..60: mol_type = genomic DNA
ggaagactgctaggccaagctaagaagttgttactttaggaattaaacacagacaaataa

SEQ ID NO: 2297 - DNA, 60 bp, Homo sapiens
  source 1..60: mol_type = genomic DNA
aatgtagccacttccccttgggttttaggcaaggaaacagatgcaatgcctcctgtaaat

SEQ ID NO: 2298 - DNA, 60 bp, Homo sapiens
  source 1..60: mol_type = genomic DNA
cattctaaagaaatcccacctctggaaatatttatccgccccccacctcaccccaccaca

SEQ ID NO: 2299 - DNA, 60 bp, Homo sapiens
  source 1..60: mol_type = genomic DNA
tgaagacggtcaatatccagagaaatattacacaaatccgaacctttttataatcattca

SEQ ID NO: 2300 - DNA, 60 bp, Homo sapiens
  source 1..60: mol_type = genomic DNA
gataaagtttactgcatggttccatttagatttttccaattcatgagtgatagtagcatt

SEQ ID NO: 2301 - DNA, 60 bp, Homo sapiens
  source 1..60: mol_type = genomic DNA
ataaaagtggtgataccaccaaagtcaccaccaggttctggcattggagaaatagtgtgt

SEQ ID NO: 2302 - DNA, 60 bp, Homo sapiens
  source 1..60: mol_type = genomic DNA
ggaaggcccaattttctgcagtttgatgtctaaacaaccacacacacctcctcccccagt

SEQ ID NO: 2303 - DNA, 60 bp, Homo sapiens
  source 1..60: mol_type = genomic DNA
taagaacattggttcccaaactaggcgctcgtcttcagaatcagcttgagagtaacataa

SEQ ID NO: 2304 - DNA, 60 bp, Homo sapiens
  source 1..60: mol_type = genomic DNA
gcatcaacttggggagatccacactgccctttcctttaagttgatgatcagcagggacag

SEQ ID NO: 2305 - DNA, 60 bp, Homo sapiens
  source 1..60: mol_type = genomic DNA
ttaaatggcagctgttttaccccatactaacacaatggatatagcaaatcttctaatatt

SEQ ID NO: 2306 - DNA, 60 bp, Homo sapiens
  source 1..60: mol_type = genomic DNA
taaggttgccagatatcatatcaaaagcaccaagctatcaacatggaaataatgggaaat

SEQ ID NO: 2307 - DNA, 60 bp, Homo sapiens
  source 1..60: mol_type = genomic DNA
tgaattgtttgccactgtgggtactttccatctggtgagggcctgagacattgtgctaat

SEQ ID NO: 2308 - DNA, 60 bp, Homo sapiens
  source 1..60: mol_type = genomic DNA
agatcagcatcagaagagctgtgaatatcaccgatctgataattgggtatttttggtaaa

SEQ ID NO: 2309 - DNA, 60 bp, Homo sapiens
  source 1..60: mol_type = genomic DNA
cttgaattctttatatagttcaaatgacatagaaacacaaacacttcctgctcctgttta

SEQ ID NO: 2310 - DNA, 60 bp, Homo sapiens
  source 1..60: mol_type = genomic DNA
tcatccttatgaaaggtaatggctctcagaaataaatacatatacatgggcatgtgcatg

SEQ ID NO: 2311 - DNA, 60 bp, Homo sapiens
  source 1..60: mol_type = genomic DNA
tgagtcaacaaatccagaacagaatttctttttcaggagccacagagagttcatttacat

SEQ ID NO: 2312 - DNA, 60 bp, Homo sapiens
  source 1..60: mol_type = genomic DNA
tagatgttgctcttggacaaaccacgttttgaaaaaattatcacagctttaagaaaagct

SEQ ID NO: 2313 - DNA, 60 bp, Homo sapiens
  source 1..60: mol_type = genomic DNA
ataaattattggtacacattttaaaagggaagcctgacgctggtattacttcctttttcc

SEQ ID NO: 2314 - DNA, 60 bp, Homo sapiens
  source 1..60: mol_type = genomic DNA
aattccttctagaagagggaatgccttcatcagaaaggtgaattttgcttcacacaaatg

SEQ ID NO: 2315 - DNA, 60 bp, Homo sapiens
  source 1..60: mol_type = genomic DNA
gaaacttcaagaatggtagctttcaacagaaaaccatacaatgacctccagtacacacat

SEQ ID NO: 2316 - DNA, 60 bp, Homo sapiens
  source 1..60: mol_type = genomic DNA
tgacccagaccacaacactgtgaatatgcacatacgtgcatacacaggtgcacatgtgcg

SEQ ID NO: 2317 - DNA, 60 bp, Homo sapiens
  source 1..60: mol_type = genomic DNA
taatattccagagagatatatcgtggggggaaattaatttctttaaatgtatatatacct

SEQ ID NO: 2318 - DNA, 60 bp, Homo sapiens
  source 1..60: mol_type = genomic DNA
cagaaagactgtgattaaattaatggttactgaaatagcaacttttcggagtgagcacat

SEQ ID NO: 2319 - DNA, 60 bp, Homo sapiens
  source 1..60: mol_type = genomic DNA
caggctgtaggtggcatactctaaagctataatacgaatttaacatactctctcacagat

SEQ ID NO: 2320 - DNA, 60 bp, Homo sapiens
  source 1..60: mol_type = genomic DNA
accataccatggttatataagaagttgcatttgaaatattaagtcccccctttaaaacat

SEQ ID NO: 2321 - DNA, 60 bp, Homo sapiens
  source 1..60: mol_type = genomic DNA
tgcagaataatatggacagtcttttcaacagtatgacagactcgcaagccatatatatat

SEQ ID NO: 2322 - DNA, 60 bp, Homo sapiens
  source 1..60: mol_type = genomic DNA
ggcccccactctgcagtttttcaaattgcttcccaagctgagaaggggtttgcgcgcgcg

SEQ ID NO: 2323 - DNA, 60 bp, Homo sapiens
  source 1..60: mol_type = genomic DNA
ttccaatgcttttgcatctgacctttagtcctttagtaccaatttaataggttcaaagta

SEQ ID NO: 2324 - DNA, 60 bp, Homo sapiens
  source 1..60: mol_type = genomic DNA
gagcaagggttacatctcctttggaaggaggtggctgtgctgcgtgtttctactcacatg

SEQ ID NO: 2325 - DNA, 60 bp, Homo sapiens
  source 1..60: mol_type = genomic DNA
tttgaggttcgagggtcagtctggtgttgcagtaagcgtcagctttccctgttttcagaa

SEQ ID NO: 2326 - DNA, 60 bp, Homo sapiens
  source 1..60: mol_type = genomic DNA
cacctgctgagatagtaggacaggtgtggcttcctctcctaacaagaacaccttttccca

SEQ ID NO: 2327 - DNA, 60 bp, Homo sapiens
  source 1..60: mol_type = genomic DNA
cccattctaaaattattacagtaattctatgcttcatttgttaaagacagcatacacgtg

SEQ ID NO: 2328 - DNA, 60 bp, Homo sapiens
  source 1..60: mol_type = genomic DNA
ttgctgtgtccttttgaacctcctttccccactgccctgcacgcctcgtgtgtgcacgtg

SEQ ID NO: 2329 - DNA, 60 bp, Homo sapiens
  source 1..60: mol_type = genomic DNA
tcacgtagattcaccatctagctgcagcgacttcctctatttatatgcatacgcgtaaaa

SEQ ID NO: 2330 - DNA, 60 bp, Homo sapiens
  source 1..60: mol_type = genomic DNA
tgcaaatctctgcctcactgtctgctttccaagaacctaagactgaccctcaatttcctt

SEQ ID NO: 2331 - DNA, 60 bp, Homo sapiens
  source 1..60: mol_type = genomic DNA
actgcttgccccacagactttggacttacttggccagctgcacaattgcacgcgcgcgcg

SEQ ID NO: 2332 - DNA, 60 bp, Homo sapiens
  source 1..60: mol_type = genomic DNA
tgagcattttccagggtagcatatttcaataacacaatacaaatcacaccaaaataccag

SEQ ID NO: 2333 - DNA, 60 bp, Homo sapiens
  source 1..60: mol_type = genomic DNA
gctccccctggccccaactcagatgcccctttagccaattctaacacacgcacgcgcgcg

SEQ ID NO: 2334 - DNA, 60 bp, Homo sapiens
  source 1..60: mol_type = genomic DNA
tctgcaacagaatattctgcaagactctcggtgctgtctaatatgctatccactagctaa

SEQ ID NO: 2335 - DNA, 60 bp, Homo sapiens
  source 1..60: mol_type = genomic DNA
aacaaagcccatgctcacatctgggcaaaggtgaagggaaggggacgagatcacacacag

SEQ ID NO: 2336 - DNA, 60 bp, Homo sapiens
  source 1..60: mol_type = genomic DNA
ttaaaaggttgagagaggggtgtcacagtactaagtgatatcctctgtgttttcgtgtga

SEQ ID NO: 2337 - DNA, 60 bp, Homo sapiens
  source 1..60: mol_type = genomic DNA
aaaggcatttcacctcctccgtttgcctgctctcctccactccccggcacataatatgcc

SEQ ID NO: 2338 - DNA, 60 bp, Homo sapiens
  source 1..60: mol_type = genomic DNA
agatattaattatgtaaatccactttattcaaggtagaaaaatcggttaaagctggtgta

SEQ ID NO: 2339 - DNA, 60 bp, Homo sapiens
  source 1..60: mol_type = genomic DNA
agtcaataagagctttctgaaattcagatcttctcattgcaacgctatacatccttcctc

SEQ ID NO: 2340 - DNA, 60 bp, Homo sapiens
  source 1..60: mol_type = genomic DNA
tttttttttgtgtgaaaagcctagataattgagctctattgttacacacaacacacacag

SEQ ID NO: 2341 - DNA, 60 bp, Homo sapiens
  source 1..60: mol_type = genomic DNA
aaacctgttaatttccatagctgatgttcacataccattccttacatggggagcacacag

SEQ ID NO: 2342 - DNA, 60 bp, Homo sapiens
  source 1..60: mol_type = genomic DNA
tggcagaatgagcataggccaatcattctggcctcacaggcttgcttagtcaaatggaag

SEQ ID NO: 2343 - DNA, 60 bp, Homo sapiens
  source 1..60: mol_type = genomic DNA
taaaaacctgacaccatttctgaccatcgtatctgcaaattattagacacacacatttat

SEQ ID NO: 2344 - DNA, 60 bp, Homo sapiens
  source 1..60: mol_type = genomic DNA
ccatgggtcatgacagcaaatgaaagtcatgaagagaaataccaaaaaagaaaaacccca

SEQ ID NO: 2345 - DNA, 60 bp, Homo sapiens
  source 1..60: mol_type = genomic DNA
caactgtcaatgttgattctgattctctttaagaatgaatccattttgtcactcttggtg

SEQ ID NO: 2346 - DNA, 60 bp, Homo sapiens
  source 1..60: mol_type = genomic DNA
taagaattcaaatcagccaacacctacatcagtcttcaagagacaactttgtttcacaca

SEQ ID NO: 2347 - DNA, 60 bp, Homo sapiens
  source 1..60: mol_type = genomic DNA
atgatgaaaatagctcattaacatcagctaactaagctgttaataaagcgtgcacgcatg

SEQ ID NO: 2348 - DNA, 60 bp, Homo sapiens
  source 1..60: mol_type = genomic DNA
tagggcctggccaccataaatgtccaggggcacatttgccgagtggctaaatgagaagcc

SEQ ID NO: 2349 - DNA, 60 bp, Homo sapiens
  source 1..60: mol_type = genomic DNA
acaaggacatgtgtttatgactggtcttagaaagctgcagctgttcacgttgctctcctt

SEQ ID NO: 2350 - DNA, 60 bp, Homo sapiens
  source 1..60: mol_type = genomic DNA
tggactaatatactgctgtgggggaaacagcttccaaaggtctctcttctcttacacatg

SEQ ID NO: 2351 - DNA, 60 bp, Homo sapiens
  source 1..60: mol_type = genomic DNA
ctttggcttcaagctatgatagagtagcatttctcactgacagcaactaaaaaggcaaat

SEQ ID NO: 2352 - DNA, 60 bp, Homo sapiens
  source 1..60: mol_type = genomic DNA
tgagcttatgggtcattactggggcttgttttctgatcagtaacttccatctacatgcat

SEQ ID NO: 2353 - DNA, 60 bp, Homo sapiens
  source 1..60: mol_type = genomic DNA
caggagggaggcatgggacgagtgtggaggctgcagtggccgatcatggactgaacactg

SEQ ID NO: 2354 - DNA, 60 bp, Homo sapiens
  source 1..60: mol_type = genomic DNA
ggtctctggattccaaggagcctctcctctgaacccctgacttcctcacctcccccccca

SEQ ID NO: 2355 - DNA, 60 bp, Homo sapiens
  source 1..60: mol_type = genomic DNA
cacatcttgcaaaatagctaactagggttcttttatgggaggcaggttatactgagacaa

SEQ ID NO: 2356 - DNA, 60 bp, Homo sapiens
  source 1..60: mol_type = genomic DNA
gacacatgctgccttctcaggtactgcttcttcatacctgcttgctcaaaagaatggtaa

SEQ ID NO: 2357 - DNA, 60 bp, Homo sapiens
  source 1..60: mol_type = genomic DNA
aatagcatttttagctaagtttgaaatgtaatacctttcaagagcacaaaattgcatctg

SEQ ID NO: 2358 - DNA, 60 bp, Homo sapiens
  source 1..60: mol_type = genomic DNA
ggcagagcagtgtttaacaaaaaaatgcctggtttcaagcacccttctacacatacacag

SEQ ID NO: 2359 - DNA, 60 bp, Homo sapiens
  source 1..60: mol_type = genomic DNA
ccagcttaatgagtggattccaagttaaagtgtggatctaagtatagatccacactgtgt

SEQ ID NO: 2360 - DNA, 60 bp, Homo sapiens
  source 1..60: mol_type = genomic DNA
atagcgtcaccatttttcaagtgcttcctaaattctaagctatatgtgcacgcgcacgtg

SEQ ID NO: 2361 - DNA, 60 bp, Homo sapiens
  source 1..60: mol_type = genomic DNA
cagaggctgaagaggggtgttatggtgccaacaggagcagcctgggcacacactgctcct

SEQ ID NO: 2362 - DNA, 60 bp, Homo sapiens
  source 1..60: mol_type = genomic DNA
actgttaaccaatttcacgggtatcccaccaaaaatactatgcttatatttgcattatat

SEQ ID NO: 2363 - DNA, 60 bp, Homo sapiens
  source 1..60: mol_type = genomic DNA
ttttattacagcctatggtggtataatggagtacaggttatatactcccagtaactttga

SEQ ID NO: 2364 - DNA, 60 bp, Homo sapiens
  source 1..60: mol_type = genomic DNA
atttggcacaaacaatgagtccatgtgccaatgaatcacacagatctacgtgaccccttt

SEQ ID NO: 2365 - DNA, 60 bp, Homo sapiens
  source 1..60: mol_type = genomic DNA
gtcaaagaaaaccaagtggaaagaaaggaaatgattctcaacagaacagaatatgcttac

SEQ ID NO: 2366 - DNA, 60 bp, Homo sapiens
  source 1..60: mol_type = genomic DNA
tacgttacaatactgcatcctcaaaacggaagtacaaactacaaacaccacacacataac

SEQ ID NO: 2367 - DNA, 60 bp, Homo sapiens
  source 1..60: mol_type = genomic DNA
tctgttcatagagttgggccattgatgaaatacagaatccctgacttgctcactaatact

SEQ ID NO: 2368 - DNA, 60 bp, Homo sapiens
  source 1..60: mol_type = genomic DNA
cagcactcactctggaggggcagctctctctatacacaaagatttacatcctcccccgca

SEQ ID NO: 2369 - DNA, 60 bp, Homo sapiens
  source 1..60: mol_type = genomic DNA
ccactttacaagctttttcttttccaacacttgccctatgacttcaggctcagtaccagg

SEQ ID NO: 2370 - DNA, 60 bp, Homo sapiens
  source 1..60: mol_type = genomic DNA
accccactgtctcctgtctccaaccctccgtctgagctcccattacacacacacatgcaa

SEQ ID NO: 2371 - DNA, 60 bp, Homo sapiens
  source 1..60: mol_type = genomic DNA
gagatctgggtgatgactgacttcgcagagtagtttaaatagcatggttgtgcacagagg

SEQ ID NO: 2372 - DNA, 60 bp, Homo sapiens
  source 1..60: mol_type = genomic DNA
agttgggacaagattgttgctcttgcaaatgtttgtgtgcccttaacacagagtctagaa

SEQ ID NO: 2373 - DNA, 60 bp, Homo sapiens
  source 1..60: mol_type = genomic DNA
ctttctcaaatattagttcactaataatttcaggtcataatttctttacacctagaaatg

SEQ ID NO: 2374 - DNA, 60 bp, Homo sapiens
  source 1..60: mol_type = genomic DNA
aacaactaccccgttgcagggtgtgaactgcggggtaggacaagacaggtccccccgccg

SEQ ID NO: 2375 - DNA, 60 bp, Homo sapiens
  source 1..60: mol_type = genomic DNA
tgacattcagtctgcatgatcaaagactctctcaggcatcaggaagaaccttccattggt

SEQ ID NO: 2376 - DNA, 60 bp, Homo sapiens
  source 1..60: mol_type = genomic DNA
attatttagtgacacattatcattggtgtcctgaaaagcaagctaactacacacacacag

SEQ ID NO: 2377 - DNA, 60 bp, Homo sapiens
  source 1..60: mol_type = genomic DNA
gaagcactttatactcattcatctgaaattgctggttataggacaatttcacagacacag

SEQ ID NO: 2378 - DNA, 60 bp, Homo sapiens
  source 1..60: mol_type = genomic DNA
actagccacaaagaatgagaaaaaccagtcagttcttcatgtttcctccaccccagcctt

SEQ ID NO: 2379 - DNA, 60 bp, Homo sapiens
  source 1..60: mol_type = genomic DNA
cctcctgcagctttatcattctcagttcccgaggccctgtcagcaactgctcaaacaaga

SEQ ID NO: 2380 - DNA, 60 bp, Homo sapiens
  source 1..60: mol_type = genomic DNA
acccatccatcagttttatatccctaatcaagactgatggtattgttacccaccaggctt

SEQ ID NO: 2381 - DNA, 60 bp, Homo sapiens
  source 1..60: mol_type = genomic DNA
ttcaatgatcctaaagaggtaggatggcttgttctttatatcaattataagactgttaga

SEQ ID NO: 2382 - DNA, 60 bp, Homo sapiens
  source 1..60: mol_type = genomic DNA
tctctctcaaaggcagaaaagggtcaattccttcctctcatcccatccccatggggatgt

SEQ ID NO: 2383 - DNA, 60 bp, Homo sapiens
  source 1..60: mol_type = genomic DNA
agactactggattcaagttttaagcagattctgtatgaaagcttcttatgattgtatcca

SEQ ID NO: 2384 - DNA, 60 bp, Homo sapiens
  source 1..60: mol_type = genomic DNA
aacagcctgagactcttcaatgcctttccgaaaactggtttctagtaaagccttgaatga

SEQ ID NO: 2385 - DNA, 60 bp, Homo sapiens
  source 1..60: mol_type = genomic DNA
agaggcctagatcccaggatcccaggacagcctctagcaaaaagatcctcagagaaatgg

SEQ ID NO: 2386 - DNA, 60 bp, Homo sapiens
  source 1..60: mol_type = genomic DNA
aattgagtttagcaattcttttggctaacttacatatcctgaactctgttacaggtttgt

SEQ ID NO: 2387 - DNA, 60 bp, Homo sapiens
  source 1..60: mol_type = genomic DNA
gatcatacttattcacaagcaatattatcagcttacagttttcttcaggattcaatgtct

SEQ ID NO: 2388 - DNA, 60 bp, Homo sapiens
  source 1..60: mol_type = genomic DNA
ctgctacagtctagcatagccctaaacttttcttcggctcagggcaaatacacacaagcg

SEQ ID NO: 2389 - DNA, 60 bp, Homo sapiens
  source 1..60: mol_type = genomic DNA
taaacatctaggggatcatctaatatcttctagtaaacacttacctcttttcttacacaa

SEQ ID NO: 2390 - DNA, 60 bp, Homo sapiens
  source 1..60: mol_type = genomic DNA
cctagaagtcctcagtcaaattagaaggcagggaggaaaagcaaggtgccagtctctgac

SEQ ID NO: 2391 - DNA, 60 bp, Homo sapiens
  source 1..60: mol_type = genomic DNA
agaatggaaaatcctgaacagggttactaaggttctaaataggaactacaaggaaaaaaa

SEQ ID NO: 2392 - DNA, 60 bp, Homo sapiens
  source 1..60: mol_type = genomic DNA
acttcacacaggagtgtgtgtaaggaagaagcttcttagagtaacttctgacacacacat

SEQ ID NO: 2393 - DNA, 60 bp, Homo sapiens
  source 1..60: mol_type = genomic DNA
cacaaaggattctaagcaaaagagtgttggtggcccagtaccaacgatagctaaaattct

SEQ ID NO: 2394 - DNA, 60 bp, Homo sapiens
  source 1..60: mol_type = genomic DNA
tcagctgaagttcctctctgggctaatgctggttccactggctaatgctagccctaactt

SEQ ID NO: 2395 - DNA, 60 bp, Homo sapiens
  source 1..60: mol_type = genomic DNA
gggctgggtttaagatctccctatccccaggggacagaaagcccctggcaccccctacaa

SEQ ID NO: 2396 - DNA, 60 bp, Homo sapiens
  source 1..60: mol_type = genomic DNA
attagggttagccaccaagcacgttttgctttaaatagcaatgggatgtcaaagcgcgcg

SEQ ID NO: 2397 - DNA, 60 bp, Homo sapiens
  source 1..60: mol_type = genomic DNA
atgccactcgggagggtgcacagcaagtcacggccggcctatggaacacacgtccccccc

SEQ ID NO: 2398 - DNA, 60 bp, Homo sapiens
  source 1..60: mol_type = genomic DNA
agctgtctattgtctgtttcagtgctgcctgctgtgttacaaatgacacctccccccaaa

SEQ ID NO: 2399 - DNA, 60 bp, Homo sapiens
  source 1..60: mol_type = genomic DNA
ttccctttgcaatatagtacttaattggcaagaaattcaccctttggcttgatgacaaca

SEQ ID NO: 2400 - DNA, 60 bp, Homo sapiens
  source 1..60: mol_type = genomic DNA
caacttatattgtttttatttgtagcacacacatatttacaagcacaagcttgcacataa

SEQ ID NO: 2401 - DNA, 60 bp, Homo sapiens
  source 1..60: mol_type = genomic DNA
cagaatccacgtcttttattctaggttgcacaatgcctagaggtgttcagaatacagcat

SEQ ID NO: 2402 - DNA, 60 bp, Homo sapiens
  source 1..60: mol_type = genomic DNA
tgttcaatcacatactgtgcaacttctttgcctttattacataatgagacatttcagaga

SEQ ID NO: 2403 - DNA, 60 bp, Homo sapiens
  source 1..60: mol_type = genomic DNA
agagaaaatgcacttccagtttaaaggctatttttcacaggggcacattctctaatagaa

SEQ ID NO: 2404 - DNA, 60 bp, Homo sapiens
  source 1..60: mol_type = genomic DNA
tggttcccaacttccttcttgttttcactatttttcctaaaaagatgtaggaggaggacg

SEQ ID NO: 2405 - DNA, 60 bp, Homo sapiens
  source 1..60: mol_type = genomic DNA
gggcatttcaacaaagtgttatccacaaagcacacaaatacaaatacgtgcctgtgcgcg

SEQ ID NO: 2406 - DNA, 60 bp, Homo sapiens
  source 1..60: mol_type = genomic DNA
cacagaaactgttcttatcccatttacctcttattacataatgggaaccccccacccacc

SEQ ID NO: 2407 - DNA, 60 bp, Homo sapiens
  source 1..60: mol_type = genomic DNA
tctgtgctctaactcctcatgactattcatgaggccctgtgttgacatcactctttgcag

SEQ ID NO: 2408 - DNA, 60 bp, Homo sapiens
  source 1..60: mol_type = genomic DNA
gttgtcactatggaaatgtgtttgagggcaggtggttttttcatctaccctcacttgcaa

SEQ ID NO: 2409 - DNA, 60 bp, Homo sapiens
  source 1..60: mol_type = genomic DNA
gcctctcctcagtcttataaaaacattaccaccaccaataaacacgtgtgcaccacacaa

SEQ ID NO: 2410 - DNA, 60 bp, Homo sapiens
  source 1..60: mol_type = genomic DNA
accacttgggacaaatatttgggttaatataccaaaactaaatgactgtgtgatgtatat

SEQ ID NO: 2411 - DNA, 60 bp, Homo sapiens
  source 1..60: mol_type = genomic DNA
ccaaggcacagacctttactgctctctatagagaacactaatcccctcttaaggaaacat

SEQ ID NO: 2412 - DNA, 60 bp, Homo sapiens
  source 1..60: mol_type = genomic DNA
cctggactcactgttgatgcggataggagactacagttagtgggaaaatgcttcatgaag

SEQ ID NO: 2413 - DNA, 60 bp, Homo sapiens
  source 1..60: mol_type = genomic DNA
aatggccccactgcagggacagggattcatggtgaccagggctcctggcaggcagccctg

SEQ ID NO: 2414 - DNA, 60 bp, Homo sapiens
  source 1..60: mol_type = genomic DNA
tatttttggaagcttcatcctatgatatataaaaatgtaccatatcctgcaataaacact

SEQ ID NO: 2415 - DNA, 60 bp, Homo sapiens
  source 1..60: mol_type = genomic DNA
tttagggaggtttgtgcttttccagactgagccagaatgctcgtactgcattttggattt

SEQ ID NO: 2416 - DNA, 60 bp, Homo sapiens
  source 1..60: mol_type = genomic DNA
ccacaagcaccactggtatcaatgaaagcccctgtgtctcagttggtctcttacacactt

SEQ ID NO: 2417 - DNA, 60 bp, Homo sapiens
  source 1..60: mol_type = genomic DNA
gtgttggcgggggcggagggcaggggaacgggatccttctcccgctgcccaccaacacca

SEQ ID NO: 2418 - DNA, 60 bp, Homo sapiens
  source 1..60: mol_type = genomic DNA
caaaatatctgcatccacctggagatgcagctaagtgggtccttatgtacacaccacgtt

SEQ ID NO: 2419 - DNA, 60 bp, Homo sapiens
  source 1..60: mol_type = genomic DNA
attaacttaaagaggcaggagggagggcaagaataaattctagattttattcatacaccg

SEQ ID NO: 2420 - DNA, 60 bp, Homo sapiens
  source 1..60: mol_type = genomic DNA
tgcgtgtattctgctacccagggcagtgctaataataatctcctcctattacacacgctt

SEQ ID NO: 2421 - DNA, 60 bp, Homo sapiens
  source 1..60: mol_type = genomic DNA
ggaagtctctctgaagcagctgcagctttggggctgctgagtgcaggaacctctcaaaac

SEQ ID NO: 2422 - DNA, 60 bp, Homo sapiens
  source 1..60: mol_type = genomic DNA
aaaatgttaacttttagccacctcattaggccacaatggtttaaactacaggtacttaaa

SEQ ID NO: 2423 - DNA, 60 bp, Homo sapiens
  source 1..60: mol_type = genomic DNA
ctcctatccctcttaaccttatctttctccatgatacttatatatatggccacacacgtg

SEQ ID NO: 2424 - DNA, 60 bp, Homo sapiens
  source 1..60: mol_type = genomic DNA
ttacaaccatataggggcctgaaacattagacaaaggtagagaatgtatgtgagcagctt

SEQ ID NO: 2425 - DNA, 60 bp, Homo sapiens
  source 1..60: mol_type = genomic DNA
tagctgcccctttagaaggaacacattcctcatgttgccaaccctccctcaccagcacat

SEQ ID NO: 2426 - DNA, 60 bp, Homo sapiens
  source 1..60: mol_type = genomic DNA
taagaagatataaatttccacaatggtgacatggtgactcgagacatattcactacatct

SEQ ID NO: 2427 - DNA, 60 bp, Homo sapiens
  source 1..60: mol_type = genomic DNA
aatactagcaggataccgaatcctagaaggtacactcttttaaaagaaaccaccatttta

SEQ ID NO: 2428 - DNA, 60 bp, Homo sapiens
  source 1..60: mol_type = genomic DNA
ttatctggtgcccaggacacaatgatcatggtgcatactcctgacttactgttttcaggt

SEQ ID NO: 2429 - DNA, 60 bp, Homo sapiens
  source 1..60: mol_type = genomic DNA
taataaagaatcagagattgatttgactttgactcctgttgcctgaaggaaattacttaa

SEQ ID NO: 2430 - DNA, 60 bp, Homo sapiens
  source 1..60: mol_type = genomic DNA
ggtaggtaaggagcttgggtgaatataaatcagcagtcttctttgtcaagaaaatatttt

SEQ ID NO: 2431 - DNA, 60 bp, Homo sapiens
  source 1..60: mol_type = genomic DNA
ttacagggctttgtctatggtttaaagcctttactatggcatgacaaccaggaacagttt

SEQ ID NO: 2432 - DNA, 60 bp, Homo sapiens
  source 1..60: mol_type = genomic DNA
ctcagtgacagtttggggtcattgaacttttactgtaactatggatcttccaaaacagaa

SEQ ID NO: 2433 - DNA, 60 bp, Homo sapiens
  source 1..60: mol_type = genomic DNA
tatttttaaaccctagcttatatgttccttagcaacagaaggagcagatgagacccccct

SEQ ID NO: 2434 - DNA, 60 bp, Homo sapiens
  source 1..60: mol_type = genomic DNA
gtatttcaattcttgtttacagcatctcttccctctgcaagaatgcctgtgtgcacacat

SEQ ID NO: 2435 - DNA, 60 bp, Homo sapiens
  source 1..60: mol_type = genomic DNA
tcctcattataagcgtgtgtctctcaaggcctactactgctgggctgaaaaaaaaaaaac

SEQ ID NO: 2436 - DNA, 60 bp, Homo sapiens
  source 1..60: mol_type = genomic DNA
tgacagtgaaaccgagggcagatcaatgagtacaggcagccaggtgagcggggacagttc

SEQ ID NO: 2437 - DNA, 60 bp, Homo sapiens
  source 1..60: mol_type = genomic DNA
tatatttatgcagagaaacagcagcttgtctcaaaaaaatcttatggggacaccacacat

SEQ ID NO: 2438 - DNA, 60 bp, Homo sapiens
  source 1..60: mol_type = genomic DNA
ataaacacatagatctttttttatgcagacagttgagtactgcggtgcgcacacacacaa

SEQ ID NO: 2439 - DNA, 60 bp, Homo sapiens
  source 1..60: mol_type = genomic DNA
ccacctgggacgcagcatcttctttactcttaaaatcctctcaccctgctctttacttaa

SEQ ID NO: 2440 - DNA, 60 bp, Homo sapiens
  source 1..60: mol_type = genomic DNA
atttcccttattcttactgctaagacctttactatctgcataaaatacaaaaatgtaaag

SEQ ID NO: 2441 - DNA, 60 bp, Homo sapiens
  source 1..60: mol_type = genomic DNA
caggaatgattcactttgtgaagccatgcctcatccttacttccaaacactgtccacaat

SEQ ID NO: 2442 - DNA, 60 bp, Homo sapiens
  source 1..60: mol_type = genomic DNA
tcaactgcagaactctggaaagtgaacatttatttggttctcttaacacacacacccatc

SEQ ID NO: 2443 - DNA, 60 bp, Homo sapiens
  source 1..60: mol_type = genomic DNA
gaccactcccagcttcccgcaaaggattgctcaaaagcctgagcccaaagaggagaataa

SEQ ID NO: 2444 - DNA, 60 bp, Homo sapiens
  source 1..60: mol_type = genomic DNA
agttcacagaagctgttgtcaggaaatgccagccccaataacctgatgcacatggaggta

SEQ ID NO: 2445 - DNA, 60 bp, Homo sapiens
  source 1..60: mol_type = genomic DNA
aggtagaaagctgggtgttacagcactgctgatggggatgaacatgcacgcaggcccatg

SEQ ID NO: 2446 - DNA, 60 bp, Homo sapiens
  source 1..60: mol_type = genomic DNA
gtattgatcacacagctgcaagcctagaaaattccccccaggtccacccaccccgaccca

SEQ ID NO: 2447 - DNA, 60 bp, Homo sapiens
  source 1..60: mol_type = genomic DNA
ggagtgacttgattaagttcctcagggagctaggttaagcagataacctttctcttgttt

SEQ ID NO: 2448 - DNA, 60 bp, Homo sapiens
  source 1..60: mol_type = genomic DNA
tgcctacctctttcacctcactttttgcctgagttcctcccacctgtccccattccatga

SEQ ID NO: 2449 - DNA, 60 bp, Homo sapiens
  source 1..60: mol_type = genomic DNA
tgctattgactgagcgcaccccgctagcgtgggcctggggagcgtgtgcgcgtgcgcggc

SEQ ID NO: 2450 - DNA, 60 bp, Homo sapiens
  source 1..60: mol_type = genomic DNA
ggagcaggcgtggaatcccagggacaccccctgcgcgcacatcacatacacgcacatcct

SEQ ID NO: 2451 - DNA, 60 bp, Homo sapiens
  source 1..60: mol_type = genomic DNA
ttgtcaatactattgtgtcaaagcttccaaggcatagcaaatttcttaaaaacacagttt

SEQ ID NO: 2452 - DNA, 60 bp, Homo sapiens
  source 1..60: mol_type = genomic DNA
tacgaataatcaccatttccacgaaagggaacaacctggtatgtagcaatctcagtaagg

SEQ ID NO: 2453 - DNA, 60 bp, Homo sapiens
  source 1..60: mol_type = genomic DNA
ataaaacaatgaaataggacacagattcagtaaattcaaatgtaaaaaatctatctgcat

SEQ ID NO: 2454 - DNA, 60 bp, Homo sapiens
  source 1..60: mol_type = genomic DNA
aaaaacttttgaaatttctacattggaaaattgccatatagtcaaatacaatttatacgt

SEQ ID NO: 2455 - DNA, 60 bp, Homo sapiens
  source 1..60: mol_type = genomic DNA
cccagagtaggcctacgttcccagcatcagagcagcttgttgacacagctcttaaaattg

SEQ ID NO: 2456 - DNA, 60 bp, Homo sapiens
  source 1..60: mol_type = genomic DNA
aacagtagccagaatttctcatcccaactgatacagaaattaggaccaaaagtgctgtta

SEQ ID NO: 2457 - DNA, 60 bp, Homo sapiens
  source 1..60: mol_type = genomic DNA
gaagcttcctttagggactgtccagtcacatggtcccttgacgtgggtgccccacaatga

SEQ ID NO: 2458 - DNA, 60 bp, Homo sapiens
  source 1..60: mol_type = genomic DNA
tttactttagctaattctataatgtttctttggctagctcctcccttgactcctggaaaa

SEQ ID NO: 2459 - DNA, 60 bp, Homo sapiens
  source 1..60: mol_type = genomic DNA
cgatatctgacccctgtatactttcatttcaatacctagcatagtgtcttgtgtacacat

SEQ ID NO: 2460 - DNA, 60 bp, Homo sapiens
  source 1..60: mol_type = genomic DNA
tattatattgaatcccagttgcctcatctgttagacatttgggagttacaacaatgagat

SEQ ID NO: 2461 - DNA, 60 bp, Homo sapiens
  source 1..60: mol_type = genomic DNA
tcatacgatagaatgatagctaggaatgctgtgttaccacaaagggttgaattgcctagg

SEQ ID NO: 2462 - DNA, 60 bp, Homo sapiens
  source 1..60: mol_type = genomic DNA
tcagtgccacaccatctttttttttactctcaagatgcccatgatactgctaataaaaac

SEQ ID NO: 2463 - DNA, 60 bp, Homo sapiens
  source 1..60: mol_type = genomic DNA
tacatccaatggataaagtaggaaaaaatataaatgtaactctctggcatgtaaaatgtg

SEQ ID NO: 2464 - DNA, 60 bp, Homo sapiens
  source 1..60: mol_type = genomic DNA
gttgattttacaaagtcagccatattgtgaatgtgaaggacaactatacataatcaggat

SEQ ID NO: 2465 - DNA, 60 bp, Homo sapiens
  source 1..60: mol_type = genomic DNA
ctgactccttctctgcatgccgcctacacacactcagcagctgttaacattaagaatatt

SEQ ID NO: 2466 - DNA, 60 bp, Homo sapiens
  source 1..60: mol_type = genomic DNA
aaagttagtataggagggaggattgaccttgattttcaggagagtacagacacacacacg

SEQ ID NO: 2467 - DNA, 60 bp, Homo sapiens
  source 1..60: mol_type = genomic DNA
gacctggcaccaaccaagcgtagaaagagaggcccttgtgatacagcctcccgacacact

SEQ ID NO: 2468 - DNA, 60 bp, Homo sapiens
  source 1..60: mol_type = genomic DNA
cacacactccgtttattgtagttgattatgaaaaaggtcagctgagtgatttgctgccag

SEQ ID NO: 2469 - DNA, 60 bp, Homo sapiens
  source 1..60: mol_type = genomic DNA
aacactgaatctttgctcaaccctacacttttgagttctgggtataaataaaaaaggtaa

SEQ ID NO: 2470 - DNA, 60 bp, Homo sapiens
  source 1..60: mol_type = genomic DNA
tgtgtgtagtttggaaaaaaggactgccagttggttcaaaataattagaatctaggggat

SEQ ID NO: 2471 - DNA, 60 bp, Homo sapiens
  source 1..60: mol_type = genomic DNA
aagtgaggtacaagtcacccttcacattagagacagctgtgactgccttgatctcttaaa

SEQ ID NO: 2472 - DNA, 60 bp, Homo sapiens
  source 1..60: mol_type = genomic DNA
tttacacaatagttggcatatacacagccccctcctctgagacactttgggtacagagct

SEQ ID NO: 2473 - DNA, 60 bp, Homo sapiens
  source 1..60: mol_type = genomic DNA
ttgtgaattaagggagttcagaaaaactccagtcttctgctgctacaccctcatcctcac

SEQ ID NO: 2474 - DNA, 60 bp, Homo sapiens
  source 1..60: mol_type = genomic DNA
aagttctcttcaacctttggactaatattttgtccattcattagccaacatccccactca

SEQ ID NO: 2475 - DNA, 60 bp, Homo sapiens
  source 1..60: mol_type = genomic DNA
ccctatagtcagttttttgcctttagatgtatgcaccagtgccaggctccatctctgcat

SEQ ID NO: 2476 - DNA, 60 bp, Homo sapiens
  source 1..60: mol_type = genomic DNA
gtgtcaactaaagcactttcactgtgaggtttaattctggaattactttcctcaaaatgt

SEQ ID NO: 2477 - DNA, 60 bp, Homo sapiens
  source 1..60: mol_type = genomic DNA
ctttgaaaacagatgtagagctagacaattctggagggcatgcacctgtgggcgcacatg

SEQ ID NO: 2478 - DNA, 60 bp, Homo sapiens
  source 1..60: mol_type = genomic DNA
tggctggcttcagacgctgacagtgacccacatgcattttatattgtgaggcagcacacg

SEQ ID NO: 2479 - DNA, 60 bp, Homo sapiens
  source 1..60: mol_type = genomic DNA
aaagtgttgtaatgcttcctattcactgaggcctgttgtaaagcaatgaaaacacacacg

SEQ ID NO: 2480 - DNA, 60 bp, Homo sapiens
  source 1..60: mol_type = genomic DNA
accattttagtggatacaaaattaacataagccatagatctgtgcaccctgtgtgtgtaa

SEQ ID NO: 2481 - DNA, 60 bp, Homo sapiens
  source 1..60: mol_type = genomic DNA
tagacttttttacagcaccttatataaacaaggcaggagaagttagaggatgtgtacctg

SEQ ID NO: 2482 - DNA, 60 bp, Homo sapiens
  source 1..60: mol_type = genomic DNA
tacaactaccagaaatagagaaattctaattatcataaggtgaccttatgcagtgatttt

SEQ ID NO: 2483 - DNA, 60 bp, Homo sapiens
  source 1..60: mol_type = genomic DNA
acctcaaatagaacaactacagggatttcaggtgagttacagaagaggcacacacacact

SEQ ID NO: 2484 - DNA, 60 bp, Homo sapiens
  source 1..60: mol_type = genomic DNA
ttgtgagtatcccataagttgcggacaagcacatctctgaattttccagtgctgttggag

SEQ ID NO: 2485 - DNA, 60 bp, Homo sapiens
  source 1..60: mol_type = genomic DNA
tcaagtgactgctcctaggaccagccaccagccaatggagacgttaaaacacacacacaa

SEQ ID NO: 2486 - DNA, 60 bp, Homo sapiens
  source 1..60: mol_type = genomic DNA
agctacaaatggtgaagatgaaggaacgttttttcaagaaaagagtggcatcaggtgcta

SEQ ID NO: 2487 - DNA, 60 bp, Homo sapiens
  source 1..60: mol_type = genomic DNA
cagtaaattaaaagaaggtctgagtaacacctgagaaatttggtccctcctcacattttc

SEQ ID NO: 2488 - DNA, 60 bp, Homo sapiens
  source 1..60: mol_type = genomic DNA
aatgatccctccttcacagagcttctgtgaaggtgacgtaaaatgcacacgcgcacacgg

SEQ ID NO: 2489 - DNA, 60 bp, Homo sapiens
  source 1..60: mol_type = genomic DNA
ccctaactcagagtttccatagatcattgcagccaatatgaacacaccaaaaaaggacat

SEQ ID NO: 2490 - DNA, 60 bp, Homo sapiens
  source 1..60: mol_type = genomic DNA
gcaacattttgaaccattcctaacctccagagtggtgggactcaatcccaagtggacact

SEQ ID NO: 2491 - DNA, 60 bp, Homo sapiens
  source 1..60: mol_type = genomic DNA
aaggcctggtggagggtggtggttgtgcactgttgctggacagatgcattcattcatgtg

SEQ ID NO: 2492 - DNA, 60 bp, Homo sapiens
  source 1..60: mol_type = genomic DNA
caaagtacaaagcatgtttgttctgctgaaggggttcaagacccctcccctagccttcca

SEQ ID NO: 2493 - DNA, 60 bp, Homo sapiens
  source 1..60: mol_type = genomic DNA
cagctaaatgaacttatgaaatcatgtttatccgagctattaccagcttctgctaacacg

SEQ ID NO: 2494 - DNA, 60 bp, Homo sapiens
  source 1..60: mol_type = genomic DNA
cactttgagacaacagaaactggcaggaggtaattaatagacttgacctgtagggtgaat

SEQ ID NO: 2495 - DNA, 60 bp, Homo sapiens
  source 1..60: mol_type = genomic DNA
tgccccttcagggaaagaaaaggtgaaaactagagaattcttgtcccccctgccacccaa

SEQ ID NO: 2496 - DNA, 60 bp, Homo sapiens
  source 1..60: mol_type = genomic DNA
agcaagaggagcctctaggggatgctgggaatcataagattgtttactcagcaccccttg

SEQ ID NO: 2497 - DNA, 60 bp, Homo sapiens
  source 1..60: mol_type = genomic DNA
cagaaagatatatatagatttgcttctagggaagagggtctatgctttttcactcacagt

SEQ ID NO: 2498 - DNA, 60 bp, Homo sapiens
  source 1..60: mol_type = genomic DNA
aagatgcaattttaccaaaatttggcttacggtaaaaaagtgtgtgcacatggagaagag

SEQ ID NO: 2499 - DNA, 60 bp, Homo sapiens
  source 1..60: mol_type = genomic DNA
atggcacactaaacacatttgctcaccatgcccctgtttcttcagatcttttcctataga

SEQ ID NO: 2500 - DNA, 60 bp, Homo sapiens
  source 1..60: mol_type = genomic DNA
ttaatggacactgagccattctctgccccaaacacatgcacgcgtggacgtgcgcacgcg

SEQ ID NO: 2501 - DNA, 60 bp, Homo sapiens
  source 1..60: mol_type = genomic DNA
gcgcacggacaccctcggattggcatttctataagagctgggcgcattgtctctgcggcg

SEQ ID NO: 2502 - DNA, 60 bp, Homo sapiens
  source 1..60: mol_type = genomic DNA
gagctagagcttacaaaagtgggcccctatatctgcccagtgccatcttctctgcacttc

SEQ ID NO: 2503 - DNA, 60 bp, Homo sapiens
  source 1..60: mol_type = genomic DNA
aggactgtatgtttcacaatggagaaatttaggaggtatacagccacatgcatgtgtgcg

SEQ ID NO: 2504 - DNA, 60 bp, Homo sapiens
  source 1..60: mol_type = genomic DNA
acaagtactctgacacacttgtcacccacgaccattacaaaggagacaaacacccaagca

SEQ ID NO: 2505 - DNA, 60 bp, Homo sapiens
  source 1..60: mol_type = genomic DNA
ttcttaaatcgttgctagataagcctcttttgcccactccaatcttcttttgctccagtc

SEQ ID NO: 2506 - DNA, 60 bp, Homo sapiens
  source 1..60: mol_type = genomic DNA
gagactgcctgcctccagtaggcacaaacaatttgtcccagcttctgactttttggggag

SEQ ID NO: 2507 - DNA, 60 bp, Homo sapiens
  source 1..60: mol_type = genomic DNA
ctatttatttcagttgtaaagattggttaccaccaagggtaaagatagattgttttaaat

SEQ ID NO: 2508 - DNA, 60 bp, Homo sapiens
  source 1..60: mol_type = genomic DNA
gggggcaggggcaaggccctggagaaaatggaacagggtgcactaacagatattgtactt

SEQ ID NO: 2509 - DNA, 60 bp, Homo sapiens
  source 1..60: mol_type = genomic DNA
tgaagtaaagagtgaagtaagaagagactaattggtccgggcaaaaggcaatgcacatgt

SEQ ID NO: 2510 - DNA, 60 bp, Homo sapiens
  source 1..60: mol_type = genomic DNA
agcaagtgtctgtgccagtttgggagaaatacatgcgacagactaacatatattcatagt

SEQ ID NO: 2511 - DNA, 60 bp, Homo sapiens
  source 1..60: mol_type = genomic DNA
atgtaggttctaaagaagactagttccatagaatgttagtagggcacacctctccccatc

SEQ ID NO: 2512 - DNA, 60 bp, Homo sapiens
  source 1..60: mol_type = genomic DNA
ggagaaaggctagcccctgacatctaaaactactagttagactcacatgtacacatctaa

SEQ ID NO: 2513 - DNA, 60 bp, Homo sapiens
  source 1..60: mol_type = genomic DNA
aggtttgggttgaagacatagggctatagtagttgtcctaaggtcttgctcataccatgt

SEQ ID NO: 2514 - DNA, 60 bp, Homo sapiens
  source 1..60: mol_type = genomic DNA
atgacagcaatataaggttgactaaccaatcatcagtgaatagctcattcacaaaaaagt

SEQ ID NO: 2515 - DNA, 60 bp, Homo sapiens
  source 1..60: mol_type = genomic DNA
agacagggttagtcatctatgaaatgattctccaaaataacactgaaacacgcacgcacg

SEQ ID NO: 2516 - DNA, 60 bp, Homo sapiens
  source 1..60: mol_type = genomic DNA
gaaaatcatagaacttcaagtatggaaatttatagtcatctagtcattcgtctcccctca

SEQ ID NO: 2517 - DNA, 60 bp, Homo sapiens
  source 1..60: mol_type = genomic DNA
caatgcaaatctaatgattgtgaactgtgtgttcacaatctgtgtgcgcaccgcacacat

SEQ ID NO: 2518 - DNA, 60 bp, Homo sapiens
  source 1..60: mol_type = genomic DNA
agctgtcatcattggtctccctctgccacaacccatgaccctaacactgcaacctacaac

SEQ ID NO: 2519 - DNA, 60 bp, Homo sapiens
  source 1..60: mol_type = genomic DNA
gtatttggttcaaagttttccctatcaagaagctctttcacccttcaacatttgaggtac

SEQ ID NO: 2520 - DNA, 60 bp, Homo sapiens
  source 1..60: mol_type = genomic DNA
gtctctgggatcatttctgtaacaaacattaggcccttggttagaaacatagctctctct

SEQ ID NO: 2521 - DNA, 60 bp, Homo sapiens
  source 1..60: mol_type = genomic DNA
agtgtggacaactaggtcttgaaggagacctaatcggctacaaaagtcagatgagcaaaa

SEQ ID NO: 2522 - DNA, 60 bp, Homo sapiens
  source 1..60: mol_type = genomic DNA
catttctttgccaaggaacccaggaatgatcccatgaataattagggaaatgacctaaaa

SEQ ID NO: 2523 - DNA, 60 bp, Homo sapiens
  source 1..60: mol_type = genomic DNA
atccccactgcagaggatttacagacacccctcttccaagcccattcatagaccccaggt

SEQ ID NO: 2524 - DNA, 60 bp, Homo sapiens
  source 1..60: mol_type = genomic DNA
tacaatgactaggagcatgatctctcccatgcaccttaatggaaggtcagccaaagctgg

SEQ ID NO: 2525 - DNA, 60 bp, Homo sapiens
  source 1..60: mol_type = genomic DNA
ggcccatagacagatgggcagatgcacccagagccccatgcacagtgtcctgcgtgggaa

SEQ ID NO: 2526 - DNA, 60 bp, Homo sapiens
  source 1..60: mol_type = genomic DNA
agtgcataaatgtcccaagtccaccgattagggaatctcacacaaagtctggccatccac

SEQ ID NO: 2527 - DNA, 60 bp, Homo sapiens
  source 1..60: mol_type = genomic DNA
tcaccacctgcttcgcttattcgaaaccttccagcaacagctcaaatgtaaattcttgta

SEQ ID NO: 2528 - DNA, 60 bp, Homo sapiens
  source 1..60: mol_type = genomic DNA
aaataaaacagaactacagtggtcatttttggctgctaccttcctcaacccttacctcca

SEQ ID NO: 2529 - DNA, 60 bp, Homo sapiens
  source 1..60: mol_type = genomic DNA
gacacacaaacacaccagaattgggttgttctctagggctccagctcagctgggaaggga

SEQ ID NO: 2530 - DNA, 60 bp, Homo sapiens
  source 1..60: mol_type = genomic DNA
gcaagcaggctgtgatcttgagtgttaggatcactggatccagaagagtttcccatttta

SEQ ID NO: 2531 - DNA, 60 bp, Homo sapiens
  source 1..60: mol_type = genomic DNA
ttgcacacactacacactacggactagagatagaattaggtgctcatgagaatgttttaa

SEQ ID NO: 2532 - DNA, 60 bp, Homo sapiens
  source 1..60: mol_type = genomic DNA
gtgaagcccagcttgcacacatgttcacactggacatctgggaaccacagtctcctgcag

SEQ ID NO: 2533 - DNA, 60 bp, Homo sapiens
  source 1..60: mol_type = genomic DNA
gcttaaatcccactggattgtgcttccattcaaagcaccacattcactaaggaagattat

SEQ ID NO: 2534 - DNA, 60 bp, Homo sapiens
  source 1..60: mol_type = genomic DNA
ccctaaacaatgccctcatagacaagcccctttcaaagtcccacctaattacaggctgac

SEQ ID NO: 2535 - DNA, 60 bp, Homo sapiens
  source 1..60: mol_type = genomic DNA
ctctagaataaaaagctcatgtctgaatggcttgtgtctgaacggctccataatttattc

SEQ ID NO: 2536 - DNA, 60 bp, Homo sapiens
  source 1..60: mol_type = genomic DNA
ccctactacaggcactccggtcgtccagggcagtggtgctcagggtgtgatctccggacc

SEQ ID NO: 2537 - DNA, 60 bp, Homo sapiens
  source 1..60: mol_type = genomic DNA
gcaggaggggcagcttgggagagaagaaacccgagtggcacatctagcctgatgccaaag

SEQ ID NO: 2538 - DNA, 60 bp, Homo sapiens
  source 1..60: mol_type = genomic DNA
cctcttcctataaaaaaactcaaattgtgaaatagtacaatttctttcagagagaatata

SEQ ID NO: 2539 - DNA, 60 bp, Homo sapiens
  source 1..60: mol_type = genomic DNA
cctttactacccatgccaatgtttctggtttggaaactgctgcactagcacagacttccc

SEQ ID NO: 2540 - DNA, 60 bp, Homo sapiens
  source 1..60: mol_type = genomic DNA
cacacacgcgcgcgcgcacagcaatcatttaaacttacttgccccagattttaaatttat

SEQ ID NO: 2541 - DNA, 60 bp, Homo sapiens
  source 1..60: mol_type = genomic DNA
gagacaaaacaatggagacttttttttggagacaaacacaaggcagatatactcttctaa

SEQ ID NO: 2542 - DNA, 60 bp, Homo sapiens
  source 1..60: mol_type = genomic DNA
tcactcacatttgattacattaaaatacacctaaattccatgcttcattaatcattttcc

SEQ ID NO: 2543 - DNA, 60 bp, Homo sapiens
  source 1..60: mol_type = genomic DNA
ccctaggaaaaggaattcctgaaacttttcattattgcatatgtttctgatcaagcaata

SEQ ID NO: 2544 - DNA, 60 bp, Homo sapiens
  source 1..60: mol_type = genomic DNA
gagagagagagatacactgcatttacattaccacagtggccaaactaatacgatggatag

SEQ ID NO: 2545 - DNA, 60 bp, Homo sapiens
  source 1..60: mol_type = genomic DNA
gtacgtcccaaccacatagagacagtctttgcaaagaagggtgtctttctcagttcttta

SEQ ID NO: 2546 - DNA, 60 bp, Homo sapiens
  source 1..60: mol_type = genomic DNA
tacgcaaattcacatacaccccctttgcaacaactctaaggtaaggtaataaaattaacc

SEQ ID NO: 2547 - DNA, 60 bp, Homo sapiens
  source 1..60: mol_type = genomic DNA
gcacaccctatcatacccaggactaaagagacgccagtccagagtagagtccgtaggcag

SEQ ID NO: 2548 - DNA, 60 bp, Homo sapiens
  source 1..60: mol_type = genomic DNA
caagaaccttctccggtgggtgggtttctttcaaaggcagtttaggttttccctgtgctg

SEQ ID NO: 2549 - DNA, 60 bp, Homo sapiens
  source 1..60: mol_type = genomic DNA
aacacatatgcgcacacacatttcttaggttatttgctcagagacaattattagcatcta

SEQ ID NO: 2550 - DNA, 60 bp, Homo sapiens
  source 1..60: mol_type = genomic DNA
tttttgtttctttcaggtagacaccttttaaaatgcagaactaactgaggcatttcagta

SEQ ID NO: 2551 - DNA, 60 bp, Homo sapiens
  source 1..60: mol_type = genomic DNA
gtctacctctgccagattctccttgctgctacagcagcaaatagaaatgaccatgtatta

SEQ ID NO: 2552 - DNA, 60 bp, Homo sapiens
  source 1..60: mol_type = genomic DNA
taaacacacacagttactcctacaaagtgctccaaataagagtggtcatgaccagaaaat

SEQ ID NO: 2553 - DNA, 60 bp, Homo sapiens
  source 1..60: mol_type = genomic DNA
ccctaccctatgggtagtgatgggccaggacaggggtccaggcaggaggagatcgtcacc

SEQ ID NO: 2554 - DNA, 60 bp, Homo sapiens
  source 1..60: mol_type = genomic DNA
tatcaaaaaggagcttctgtttagatgtttaacaaacgacaaaaaatattactcaagata

SEQ ID NO: 2555 - DNA, 60 bp, Homo sapiens
  source 1..60: mol_type = genomic DNA
tagcagggtatcactcagtatctattacattaatgaatgaaactgttgtcccattcaaat

SEQ ID NO: 2556 - DNA, 60 bp, Homo sapiens
  source 1..60: mol_type = genomic DNA
gaatagaaggcaacagccagggaatacagtggctggagagagtcctgctacttttcttct

SEQ ID NO: 2557 - DNA, 60 bp, Homo sapiens
  source 1..60: mol_type = genomic DNA
gagtgatatggctaggcagctgctgctggtcaacattagtgagatttccctcttgtgctg

SEQ ID NO: 2558 - DNA, 60 bp, Homo sapiens
  source 1..60: mol_type = genomic DNA
aacacacagagacactccacaggagtaccataaatttagctatcacgttcctctacacat

SEQ ID NO: 2559 - DNA, 60 bp, Homo sapiens
  source 1..60: mol_type = genomic DNA
ccctccagatatatacttcttaactatagggggaggagttaatttccagttagtgcttca

SEQ ID NO: 2560 - DNA, 60 bp, Homo sapiens
  source 1..60: mol_type = genomic DNA
tacacttaggctgacttacctgttttcagaatgtgcactcgtggcagacaattacctcgg

SEQ ID NO: 2561 - DNA, 60 bp, Homo sapiens
  source 1..60: mol_type = genomic DNA
ggcacacagactcacacacgtttgtcaccaactcctggtatagaatatagcttatattca

SEQ ID NO: 2562 - DNA, 60 bp, Homo sapiens
  source 1..60: mol_type = genomic DNA
gttgtctagagtctcccttctggacctctgcctgccccagatccttccagattcctgtca

SEQ ID NO: 2563 - DNA, 60 bp, Homo sapiens
  source 1..60: mol_type = genomic DNA
ccctaaccaggccagagacttgagctcagactgcctggagctggtgggggctggaaaaag

SEQ ID NO: 2564 - DNA, 60 bp, Homo sapiens
  source 1..60: mol_type = genomic DNA
gcagagtctgggctaaaggctggagctccttgcctccctaaaggtgaggcagttggcgtc

SEQ ID NO: 2565 - DNA, 60 bp, Homo sapiens
  source 1..60: mol_type = genomic DNA
gccagtcttatcataagcctggcagagcagctcaggatggaaaaatttcataattgagat

SEQ ID NO: 2566 - DNA, 60 bp, Homo sapiens
  source 1..60: mol_type = genomic DNA
tagctccctgcttgcaaaacaaaatgcattttgcctacaatatatttcgtttagagtagc

SEQ ID NO: 2567 - DNA, 60 bp, Homo sapiens
  source 1..60: mol_type = genomic DNA
attattagacctgtctttactttgtattaatggagggatgtcacttttcttgtttatcct

SEQ ID NO: 2568 - DNA, 60 bp, Homo sapiens
  source 1..60: mol_type = genomic DNA
gcacacacatatgcatttattggcccaacaagaatctctgatgtacctccctctactttt

SEQ ID NO: 2569 - DNA, 60 bp, Homo sapiens
  source 1..60: mol_type = genomic DNA
cccccttctattttctccccatgtaacaaggcttctcttgatgagaacaatggtctcatg

SEQ ID NO: 2570 - DNA, 60 bp, Homo sapiens
  source 1..60: mol_type = genomic DNA
cccagctgctttggtcattgctacattctgggaatcctctgaagactctaagaccaaact

SEQ ID NO: 2571 - DNA, 60 bp, Homo sapiens
  source 1..60: mol_type = genomic DNA
cctcgcatttgctgcatttcacatctgttgggctgcccctgaaggacacaatctaattcc

SEQ ID NO: 2572 - DNA, 60 bp, Homo sapiens
  source 1..60: mol_type = genomic DNA
cctggtatgtcatggatgatgcttgtcttaccaaatctgcactagtctaggagtagctgc

SEQ ID NO: 2573 - DNA, 60 bp, Homo sapiens
  source 1..60: mol_type = genomic DNA
tgttctctgacatattaccttacagataagcctaccagttgacaagcctgtgcatataga

SEQ ID NO: 2574 - DNA, 60 bp, Homo sapiens
  source 1..60: mol_type = genomic DNA
gactccatttttcatcaaggccaccttccagaaagaaattactctttgactactcagaga

SEQ ID NO: 2575 - DNA, 60 bp, Homo sapiens
  source 1..60: mol_type = genomic DNA
atcttcagtttgagttgagatgggggtcagagttccaggcagcagagcatgctcaaatgc

SEQ ID NO: 2576 - DNA, 60 bp, Homo sapiens
  source 1..60: mol_type = genomic DNA
aaccccaaatctactcacaagtgctgccatgacgcctaggaacagaaacaggatttggaa

SEQ ID NO: 2577 - DNA, 60 bp, Homo sapiens
  source 1..60: mol_type = genomic DNA
tacacgcactcacaagctcacagggctacacttaagctcatcaactgcaagaagtattgg

SEQ ID NO: 2578 - DNA, 60 bp, Homo sapiens
  source 1..60: mol_type = genomic DNA
ggctttatggaatgccagaaaagcttcctcttggatgctgcctggagtaatgactttttg

SEQ ID NO: 2579 - DNA, 60 bp, Homo sapiens
  source 1..60: mol_type = genomic DNA
gtttcaaacagctgggaaattattcccagtattgggtgacttttggctcaccaagaagag

SEQ ID NO: 2580 - DNA, 60 bp, Homo sapiens
  source 1..60: mol_type = genomic DNA
gcactctctacatatcacacatacactctcagggaagcaatgaaaaattaccaaacaggg

SEQ ID NO: 2581 - DNA, 60 bp, Homo sapiens
  source 1..60: mol_type = genomic DNA
aaaccttttagtctataaatgcattctgtgatggtctcaaattgaacaatgtgggacaag

SEQ ID NO: 2582 - DNA, 60 bp, Homo sapiens
  source 1..60: mol_type = genomic DNA
gtacatcaatccatagctatggagccagaacatcatgtttacaaggaaggaatagctctg

SEQ ID NO: 2583 - DNA, 60 bp, Homo sapiens
  source 1..60: mol_type = genomic DNA
gaaacatagagaaggtatgttaagattacctggtagagtactcaacaagagtcaaaattg

SEQ ID NO: 2584 - DNA, 60 bp, Homo sapiens
  source 1..60: mol_type = genomic DNA
tttttggagagcaaacttgatttaaatgcacaggccgtttaatccagcaattcacaattc

SEQ ID NO: 2585 - DNA, 60 bp, Homo sapiens
  source 1..60: mol_type = genomic DNA
tccctgtatatccactgcacaacctaccctgtagcctctcaaagctataattgaggactg

SEQ ID NO: 2586 - DNA, 60 bp, Homo sapiens
  source 1..60: mol_type = genomic DNA
aatcccacagtgttccaagtactccatgcttcatgtttaaatgtggtagaatgtttcatg

SEQ ID NO: 2587 - DNA, 60 bp, Homo sapiens
  source 1..60: mol_type = genomic DNA
tgcgtgcacgcatacacatatgatggcattttgaggatgccagcctattattcacccagg

SEQ ID NO: 2588 - DNA, 60 bp, Homo sapiens
  source 1..60: mol_type = genomic DNA
gcacacacaactgatcttccctgactccaactcttcaacatcagtttaactgcaaatgtg

SEQ ID NO: 2589 - DNA, 60 bp, Homo sapiens
  source 1..60: mol_type = genomic DNA
tcctttcatctgtctcctctatggctacaaggggagaaatcccttggtgggaataagacc

SEQ ID NO: 2590 - DNA, 60 bp, Homo sapiens
  source 1..60: mol_type = genomic DNA
ctctgttgagaagccctggaggtggctcattatgacccaggctgtgtctgagaccaagct

SEQ ID NO: 2591 - DNA, 60 bp, Homo sapiens
  source 1..60: mol_type = genomic DNA
tacatctacatcctgtcctctgccaaagcaaaggagcatatctttattgaaggaaatagt

SEQ ID NO: 2592 - DNA, 60 bp, Homo sapiens
  source 1..60: mol_type = genomic DNA
gcaatgttgttgtcattattgctgctctgtattaaagcccggctgggacgtaccctacac

SEQ ID NO: 2593 - DNA, 60 bp, Homo sapiens
  source 1..60: mol_type = genomic DNA
gcacacagagttatgggcattggtattagtataattgcttgtatccaacttgagtggata

SEQ ID NO: 2594 - DNA, 60 bp, Homo sapiens
  source 1..60: mol_type = genomic DNA
tgcaccctgcctctaccttttaacttccagagactaccctgtactcaaatgggcaccttc

SEQ ID NO: 2595 - DNA, 60 bp, Homo sapiens
  source 1..60: mol_type = genomic DNA
tgcgcacacacagtctctcgtacacgcagacggtcacgctcctgttaggcttctggagac

SEQ ID NO: 2596 - DNA, 60 bp, Homo sapiens
  source 1..60: mol_type = genomic DNA
tgcacgcggaacctgagagacacgccgatgctgggggacacatgtccctatgcagggatc

SEQ ID NO: 2597 - DNA, 60 bp, Homo sapiens
  source 1..60: mol_type = genomic DNA
accttcctgtgtgacagtctggctgcagctgacctgccttttcagttcacccccattctt

SEQ ID NO: 2598 - DNA, 60 bp, Homo sapiens
  source 1..60: mol_type = genomic DNA
ccccctacatgctcatcctcatcaccctagtgaactggtgatttgctgtgtggaggaaat

SEQ ID NO: 2599 - DNA, 60 bp, Homo sapiens
  source 1..60: mol_type = genomic DNA
aaaggagagggagaattaggatgactcactctaaatttctgggatttctaagtaaacaag

SEQ ID NO: 2600 - DNA, 60 bp, Homo sapiens
  source 1..60: mol_type = genomic DNA
tgctgcattcgtgcaggatgggctcagcgcctgctgtgcctggcgtggctgtgtgcatgg

SEQ ID NO: 2601 - DNA, 60 bp, Homo sapiens
  source 1..60: mol_type = genomic DNA
ggacacagcaagctatctggtaagctggtggttaagaatccgaatgtgtgctcaaggccc

SEQ ID NO: 2602 - DNA, 60 bp, Homo sapiens
  source 1..60: mol_type = genomic DNA
gcgcgcgcgtgcacatttcttgtgcatctcagattcttgcctgttcttttcaagctctat

SEQ ID NO: 2603 - DNA, 60 bp, Homo sapiens
  source 1..60: mol_type = genomic DNA
ggatctcgtgcttgtggtaggtacattcaagccaccatgccctttgtttagtttaattta

SEQ ID NO: 2604 - DNA, 60 bp, Homo sapiens
  source 1..60: mol_type = genomic DNA
gatggagggagatgttaacctactacaaaataagttcaaggtaaaaatcaacttaaatgg

SEQ ID NO: 2605 - DNA, 60 bp, Homo sapiens
  source 1..60: mol_type = genomic DNA
ttcctgagcatactgaggaaatctgcatctgagcctcatgatggaatgaagcaataagaa

SEQ ID NO: 2606 - DNA, 60 bp, Homo sapiens
  source 1..60: mol_type = genomic DNA
cccaacaaagtaccaagaacaatgactacttcaatattgcagagatttggaaagctctgg

SEQ ID NO: 2607 - DNA, 60 bp, Homo sapiens
  source 1..60: mol_type = genomic DNA
gcagttagaattgttgaagaatattagtgctggaaaggaacacagaagtaccatgttact

SEQ ID NO: 2608 - DNA, 60 bp, Homo sapiens
  source 1..60: mol_type = genomic DNA
gaaagagttttcttaagctaaacttacttgtcattcattcatagacttaaagctggctgc

SEQ ID NO: 2609 - DNA, 60 bp, Homo sapiens
  source 1..60: mol_type = genomic DNA
ttctgcattttaaacatcagatgtgtcccagtggagttggcagtcaagagagtcactgta

SEQ ID NO: 2610 - DNA, 60 bp, Homo sapiens
  source 1..60: mol_type = genomic DNA
tgccagtgcccagggacactggtcacacacagagtggtcacagaggcctggactccctgt

SEQ ID NO: 2611 - DNA, 60 bp, Homo sapiens
  source 1..60: mol_type = genomic DNA
cattcgctctttaaacatctaaaatggcacatgttcacctaggccttcgtgtataggaaa

SEQ ID NO: 2612 - DNA, 60 bp, Homo sapiens
  source 1..60: mol_type = genomic DNA
cacctctgacaggaaggacagcctgggtaatccctgctgtcctcccagctgtgatcagag

SEQ ID NO: 2613 - DNA, 60 bp, Homo sapiens
  source 1..60: mol_type = genomic DNA
cccactttcactccactctgatttaagattgcacctatggttctcagtatctagtttaca

SEQ ID NO: 2614 - DNA, 60 bp, Homo sapiens
  source 1..60: mol_type = genomic DNA
agaagacacagctcttttagactgattgttttcccccaaaaaagttcatctcaaagagcc

SEQ ID NO: 2615 - DNA, 60 bp, Homo sapiens
  source 1..60: mol_type = genomic DNA
gagtaaagcacagacaaatgtagattccattgtcgaggattctgcttctcttcttcctag

SEQ ID NO: 2616 - DNA, 60 bp, Homo sapiens
  source 1..60: mol_type = genomic DNA
ccttaaaccaaaccattaaaagacatgcactaaagagacattttagcaaaaagcacttga

SEQ ID NO: 2617 - DNA, 60 bp, Homo sapiens
  source 1..60: mol_type = genomic DNA
gagagagagagacacatctttactctctgcctcctgcctgatccccgcaccatctggtgc

SEQ ID NO: 2618 - DNA, 60 bp, Homo sapiens
  source 1..60: mol_type = genomic DNA
gcaacacatacacacacaacagtattaacaagtgggcctatggctatcacctgtctcatg

SEQ ID NO: 2619 - DNA, 60 bp, Homo sapiens
  source 1..60: mol_type = genomic DNA
ccctaaacaacaataacagcatctcagctaaacgcagcaaacttttatgagtttagccct

SEQ ID NO: 2620 - DNA, 60 bp, Homo sapiens
  source 1..60: mol_type = genomic DNA
gtatccagtacagatacaaccccataggtatagacagcatgtactgaggcagatacatat

SEQ ID NO: 2621 - DNA, 60 bp, Homo sapiens
  source 1..60: mol_type = genomic DNA
atcattcagcagtaagcatctattgagtaacctacattctgcctgtttcaggcagtcatc

SEQ ID NO: 2622 - DNA, 60 bp, Homo sapiens
  source 1..60: mol_type = genomic DNA
tattttttctttttccatttattctacttatgagctagaactgtgggaccagtgccttta

SEQ ID NO: 2623 - DNA, 60 bp, Homo sapiens
  source 1..60: mol_type = genomic DNA
gagtttcccaagtctactcttaacattgcttctcacttcattcttaatagggtaggtgga

SEQ ID NO: 2624 - DNA, 60 bp, Homo sapiens
  source 1..60: mol_type = genomic DNA
tacagaagaggattgcaaacacatggctccatcttctgcacacgaaaggaaagtccctct

SEQ ID NO: 2625 - DNA, 60 bp, Homo sapiens
  source 1..60: mol_type = genomic DNA
tataccagccagaagtagacttaccctaagtattttggggccctatgcaagaagagaacc

SEQ ID NO: 2626 - DNA, 60 bp, Homo sapiens
  source 1..60: mol_type = genomic DNA
ggagtgaagagaagagagcccagtggggcagggagaggcctcacaagattaggaagctga

SEQ ID NO: 2627 - DNA, 60 bp, Homo sapiens
  source 1..60: mol_type = genomic DNA
ccatcaccatcaccactcacctagctgactcctcacctttcaggcctccatcaaagaggc

SEQ ID NO: 2628 - DNA, 60 bp, Homo sapiens
  source 1..60: mol_type = genomic DNA
caatttttcttatctccattactaatcagagttctttctacactagggtaactaagcatc

SEQ ID NO: 2629 - DNA, 60 bp, Homo sapiens
  source 1..60: mol_type = genomic DNA
caccaacgcagcaggcacactgccccagcataacattcacccttgaacagcaactcctgc

SEQ ID NO: 2630 - DNA, 60 bp, Homo sapiens
  source 1..60: mol_type = genomic DNA
tgccctgccaaagatgtccccccactcagatgctgggaggaatcatccctcttccatctt

SEQ ID NO: 2631 - DNA, 60 bp, Homo sapiens
  source 1..60: mol_type = genomic DNA
ggaaagtaaggaactgatgccttccctccccagcagtactgaaggagcgaccctagaatg

SEQ ID NO: 2632 - DNA, 60 bp, Homo sapiens
  source 1..60: mol_type = genomic DNA
gattcttttcttatattctctctgggtgagtggagccaattgtagtcattttctcaataa

SEQ ID NO: 2633 - DNA, 60 bp, Homo sapiens
  source 1..60: mol_type = genomic DNA
gggtttttgttcttatcagagtatttggctactaggcagatatatcaccaaaaatgattc

SEQ ID NO: 2634 - DNA, 60 bp, Homo sapiens
  source 1..60: mol_type = genomic DNA
gcacacacacggaatgaaaattccagctccaaactatattgggtaaacctgctgtcttta

SEQ ID NO: 2635 - DNA, 60 bp, Homo sapiens
  source 1..60: mol_type = genomic DNA
tccacttatcttcaaccaggatttgatcactgtgatgttcatagcttgtcaacattgcta

SEQ ID NO: 2636 - DNA, 60 bp, Homo sapiens
  source 1..60: mol_type = genomic DNA
ctgaggactccccacccctcggttccttacctcctatctacgccacccaaagaaaaagag

SEQ ID NO: 2637 - DNA, 60 bp, Homo sapiens
  source 1..60: mol_type = genomic DNA
aacccagattgattcacatggaaactcactgaggccagatacaccagcatacagaaagac

SEQ ID NO: 2638 - DNA, 60 bp, Homo sapiens
  source 1..60: mol_type = genomic DNA
aatgaaaaactcttcctggcttcaaagtaagcagaatgactagctgagccactctcggtc

SEQ ID NO: 2639 - DNA, 60 bp, Homo sapiens
  source 1..60: mol_type = genomic DNA
ccctcctgttgtgtcaggtggcctaatttcttcagattgaaaagtctgctggatggctgt

SEQ ID NO: 2640 - DNA, 60 bp, Homo sapiens
  source 1..60: mol_type = genomic DNA
tcccctacatccaaactctggctgtacttagagcatccttcatttaagggtataaaagtc

SEQ ID NO: 2641 - DNA, 60 bp, Homo sapiens
  source 1..60: mol_type = genomic DNA
tacaccactgctgctaacatgttcttacatgcctgaggttgctggcttttgctgttcatg

SEQ ID NO: 2642 - DNA, 60 bp, Homo sapiens
  source 1..60: mol_type = genomic DNA
tacacaattggggtggtggtggttgtgaatgtctatataatgctaagatcatcattgcag

SEQ ID NO: 2643 - DNA, 60 bp, Homo sapiens
  source 1..60: mol_type = genomic DNA
aacatctataaacttagctcctgggttccattcttgttgcccttgataagtagagcagtt

SEQ ID NO: 2644 - DNA, 60 bp, Homo sapiens
  source 1..60: mol_type = genomic DNA
aaagtgtagagcttgaagatagtttatgtacaacccaaaatcagatatacaatatttttc

SEQ ID NO: 2645 - DNA, 60 bp, Homo sapiens
  source 1..60: mol_type = genomic DNA
tttccgtacaataagaaatggtattaggagccaactcagaggacataatagaggattatc

SEQ ID NO: 2646 - DNA, 60 bp, Homo sapiens
  source 1..60: mol_type = genomic DNA
acttcatatattttcatactgaaaatctgcccttttggcttataggactctcctcccact

SEQ ID NO: 2647 - DNA, 60 bp, Homo sapiens
  source 1..60: mol_type = genomic DNA
atgcacacacggatatatgcagtttcccatgaagagtccacaacttttatcatattttaa

SEQ ID NO: 2648 - DNA, 60 bp, Homo sapiens
  source 1..60: mol_type = genomic DNA
aataccattaatgattaaagaagatgaggtctagattaaggattaaacctaagctcatga

SEQ ID NO: 2649 - DNA, 60 bp, Homo sapiens
  source 1..60: mol_type = genomic DNA
aaaacaactgctcataactgctgggaaaagtcattaggcccttgttcagtatgattggaa

SEQ ID NO: 2650 - DNA, 60 bp, Homo sapiens
  source 1..60: mol_type = genomic DNA
gtttttgtcttacagatttagttctttacttgtggtgaaactattagaatagaggcaaaa

SEQ ID NO: 2651 - DNA, 60 bp, Homo sapiens
  source 1..60: mol_type = genomic DNA
aaaatctcaaaggctctgctaagaaatgacatggggtgatgcagggcaagggcatctggt

SEQ ID NO: 2652 - DNA, 60 bp, Homo sapiens
  source 1..60: mol_type = genomic DNA
gtacacacccactcacacccattccagacttctaagaatgacgtgctgccaacaaaggct

SEQ ID NO: 2653 - DNA, 60 bp, Homo sapiens
  source 1..60: mol_type = genomic DNA
gtcctcagttgctcttctcaaatcctaaccttcctatcatgacatgctgtattatctacc

SEQ ID NO: 2654 - DNA, 60 bp, Homo sapiens
  source 1..60: mol_type = genomic DNA
cagacaacagaaggcaagatttatatattctgcccttagccctcttgcctggaggactca

SEQ ID NO: 2655 - DNA, 60 bp, Homo sapiens
  source 1..60: mol_type = genomic DNA
cccagaatggacataagcaaatctgcaaggcaccctacacaaagcccattgcctgggcag

SEQ ID NO: 2656 - DNA, 60 bp, Homo sapiens
  source 1..60: mol_type = genomic DNA
aacacacctccccccaactccctctcttagtcccctagccacactaaacttccaccacac

SEQ ID NO: 2657 - DNA, 60 bp, Homo sapiens
  source 1..60: mol_type = genomic DNA
accttctctaaatgttgagaacacaagaccaagttatcacattcttaaagcactagacag

SEQ ID NO: 2658 - DNA, 60 bp, Homo sapiens
  source 1..60: mol_type = genomic DNA
gtcgagatcacaagctcactcaggggcttaagcagaatcacctccagcgaggagagtgca

SEQ ID NO: 2659 - DNA, 60 bp, Homo sapiens
  source 1..60: mol_type = genomic DNA
cagcagctgctgaccctagtttccagcacatgttttctgctatttattctcccagtccac

SEQ ID NO: 2660 - DNA, 60 bp, Homo sapiens
  source 1..60: mol_type = genomic DNA
aatgaatatgaagactctctccctctcagaattcaaaaaggttttcattgatcttcttcg

SEQ ID NO: 2661 - DNA, 60 bp, Homo sapiens
  source 1..60: mol_type = genomic DNA
gcttctcttctgctctctgcagtccccaatagctggaccaagttgtctccccagcctgga

SEQ ID NO: 2662 - DNA, 60 bp, Homo sapiens
  source 1..60: mol_type = genomic DNA
tcgcctttcaattccttaaggcttagccaacattcacaggagaaatgtcccctgcctttg

SEQ ID NO: 2663 - DNA, 60 bp, Homo sapiens
  source 1..60: mol_type = genomic DNA
tctctctctcattagctgctaattaactagccctaggctcttaatcacttgacagaaaaa

SEQ ID NO: 2664 - DNA, 60 bp, Homo sapiens
  source 1..60: mol_type = genomic DNA
cagagtttaaaccttttaggagataaaactcatctattgcatgtgtgtccacatacatgt

SEQ ID NO: 2665 - DNA, 60 bp, Homo sapiens
  source 1..60: mol_type = genomic DNA
ctccaccattttctataattaaagcaggtggccagcattttgttgagcataaaaaagaga

SEQ ID NO: 2666 - DNA, 60 bp, Homo sapiens
  source 1..60: mol_type = genomic DNA
gtatgcaagagcgtacagaacttcttattctttttttgggtaacacttagcacatattaa

SEQ ID NO: 2667 - DNA, 60 bp, Homo sapiens
  source 1..60: mol_type = genomic DNA
gcacacacgcacacttctatcttcccaagggggttcttacgagtacgatagtaatatagt

SEQ ID NO: 2668 - DNA, 60 bp, Homo sapiens
  source 1..60: mol_type = genomic DNA
ggcacacaccccaaatcagcttctttgatgatttaatgggtggagttaagttgagaacag

SEQ ID NO: 2669 - DNA, 60 bp, Homo sapiens
  source 1..60: mol_type = genomic DNA
gcacaagtgtatttggaagaatatatagacaaatagagttcctaagtcactctcattctg

SEQ ID NO: 2670 - DNA, 60 bp, Homo sapiens
  source 1..60: mol_type = genomic DNA
tttgaaaattcagtccctgagttgcttgtcctgaacccttgtccaatattcaataacgta

SEQ ID NO: 2671 - DNA, 60 bp, Homo sapiens
  source 1..60: mol_type = genomic DNA
gacacacacacaacacgcaacacatttgtatccttctatgcttaatgatatgttcttttc

SEQ ID NO: 2672 - DNA, 60 bp, Homo sapiens
  source 1..60: mol_type = genomic DNA
tgcatatatacagcgcttattcttgagacttacccttgggctatattccctcatattgaa

SEQ ID NO: 2673 - DNA, 60 bp, Homo sapiens
  source 1..60: mol_type = genomic DNA
gactcacacagataggtgtattactaagtaacaattatacttttcctgagttgagtcact

SEQ ID NO: 2674 - DNA, 60 bp, Homo sapiens
  source 1..60: mol_type = genomic DNA
cccatggctggtgatactttgcccacttctcagccataaacaaagctccagaaacttcac

SEQ ID NO: 2675 - DNA, 60 bp, Homo sapiens
  source 1..60: mol_type = genomic DNA
tgcaaacatgttcttgtactccagtgaggactaagtggcacccattgtgcttggttaggt

SEQ ID NO: 2676 - DNA, 60 bp, Homo sapiens
  source 1..60: mol_type = genomic DNA
ggcacacttaagcttttagcttggcatgattatactgttgagttccacatggtttaactg

SEQ ID NO: 2677 - DNA, 60 bp, Homo sapiens
  source 1..60: mol_type = genomic DNA
gaaagcactttagcattcttaaagagcaagattcagcatattgtctatgagcaaaatgaa

SEQ ID NO: 2678 - DNA, 60 bp, Homo sapiens
  source 1..60: mol_type = genomic DNA
ttttaggtaagagcctgcattctttggagaaagtggtatttaactgctgcaaccacatgt

SEQ ID NO: 2679 - DNA, 60 bp, Homo sapiens
  source 1..60: mol_type = genomic DNA
tactcttccctgactgtcttcagggcccagacattctgtatagaagaaccatgccactga

SEQ ID NO: 2680 - DNA, 60 bp, Homo sapiens
  source 1..60: mol_type = genomic DNA
gggaattgtgaaaggttaattatactgaggtacattcaaactcaattattgcctcatgaa

SEQ ID NO: 2681 - DNA, 60 bp, Homo sapiens
  source 1..60: mol_type = genomic DNA
ttatttgtctaggctcaaaactctccatttacgtatcttgcttacagttcttacaaacag

SEQ ID NO: 2682 - DNA, 60 bp, Homo sapiens
  source 1..60: mol_type = genomic DNA
tgcaggatattgcaagtcatttcttgggattgatacagctcctggacattagaggagtag

SEQ ID NO: 2683 - DNA, 60 bp, Homo sapiens
  source 1..60: mol_type = genomic DNA
aacacatatacatatttgggacactactccctgccccttctaagctcactatgaatgcat

SEQ ID NO: 2684 - DNA, 60 bp, Homo sapiens
  source 1..60: mol_type = genomic DNA
aaaggctggattgcatccctagtctaaaatttctcaatggctgctctctgcttactgaac

SEQ ID NO: 2685 - DNA, 60 bp, Homo sapiens
  source 1..60: mol_type = genomic DNA
ttactgtcagccaaactctagccttccttaaagaaatgccttccaaacaaccctgagcag

SEQ ID NO: 2686 - DNA, 60 bp, Homo sapiens
  source 1..60: mol_type = genomic DNA
gtacaggagttgttacaaagaaaaagattctcatacggttaaagtgttgaaagagttctc

SEQ ID NO: 2687 - DNA, 60 bp, Homo sapiens
  source 1..60: mol_type = genomic DNA
ttctgaagcttgtcatccttaactaatatgggagagaatgctaactaaatccccaaatcc

SEQ ID NO: 2688 - DNA, 60 bp, Homo sapiens
  source 1..60: mol_type = genomic DNA
tcacagcattagctttatgaaggaggcaacagaagacacaatggccctaaaattgcattg

SEQ ID NO: 2689 - DNA, 60 bp, Homo sapiens
  source 1..60: mol_type = genomic DNA
atttttctattaatagataaaactcaagacaatagctccaaaaataacctcttcttcaag

SEQ ID NO: 2690 - DNA, 60 bp, Homo sapiens
  source 1..60: mol_type = genomic DNA
ccaaaatcaaaagggacccagctcacagaggcctagtacagagcaagtgaccactggcag

SEQ ID NO: 2691 - DNA, 60 bp, Homo sapiens
  source 1..60: mol_type = genomic DNA
gggtattggctatggacctctcatctttcattgaaaaccccccattccttctttttctta

SEQ ID NO: 2692 - DNA, 60 bp, Homo sapiens
  source 1..60: mol_type = genomic DNA
gacgaacaaacatttttgtacagacagaaattctactctgaatattggtaaaagtagtaa

SEQ ID NO: 2693 - DNA, 60 bp, Homo sapiens
  source 1..60: mol_type = genomic DNA
ctggaatcaaagtagtcttctgatttgggggtaatgtctggaaaagtctctggggtcccc

SEQ ID NO: 2694 - DNA, 60 bp, Homo sapiens
  source 1..60: mol_type = genomic DNA
atttgtgactcaatcaattttgttggttgggttgtctagcccaggaacaatataaaactg

SEQ ID NO: 2695 - DNA, 60 bp, Homo sapiens
  source 1..60: mol_type = genomic DNA
tgcacaaacacctcactcaaatacagcacagaaggcttcccctcttgatacacacatcca

SEQ ID NO: 2696 - DNA, 60 bp, Homo sapiens
  source 1..60: mol_type = genomic DNA
gccactggtgtgagctgaggacagaggtcggcacagctgtgatgcctgaaagaggggcca

SEQ ID NO: 2697 - DNA, 60 bp, Homo sapiens
  source 1..60: mol_type = genomic DNA
aagttcagcctcagaagccttaagaggattttgcaattagaaaaccttagaaaaagttgt

SEQ ID NO: 2698 - DNA, 60 bp, Homo sapiens
  source 1..60: mol_type = genomic DNA
aacacacgagttagattttcttttacaacaaaaccacattttatttacaaggccaggcct

SEQ ID NO: 2699 - DNA, 60 bp, Homo sapiens
  source 1..60: mol_type = genomic DNA
ccctcccctcttcaacacttacccattccaaagttttatggagtttcactttgactacgc

SEQ ID NO: 2700 - DNA, 60 bp, Homo sapiens
  source 1..60: mol_type = genomic DNA
agtcaagacagccttaccatactctttagatctacaaaacaaagcatttgaaaactcatt

SEQ ID NO: 2701 - DNA, 60 bp, Homo sapiens
  source 1..60: mol_type = genomic DNA
ccctgtcagttacttgccggcaggtgcctgggggtgtgggaaggcggccctaaactcagg

SEQ ID NO: 2702 - DNA, 60 bp, Homo sapiens
  source 1..60: mol_type = genomic DNA
ttgggaaacacggtccaaagaacaccacgtggctgcttgccatcctagcaggcatctcct

SEQ ID NO: 2703 - DNA, 60 bp, Homo sapiens
  source 1..60: mol_type = genomic DNA
aattggcacattggtattttccatagaactagatgaacatctgcaaaaaggagtgaacat

SEQ ID NO: 2704 - DNA, 60 bp, Homo sapiens
  source 1..60: mol_type = genomic DNA
aatatatgatcgttgatcagggcaatgttcataggtgttaactcaagaaaatttaaccaa

SEQ ID NO: 2705 - DNA, 60 bp, Homo sapiens
  source 1..60: mol_type = genomic DNA
ataggacagtgatagccattgttgctaaatccttccatacaaaatgctaattgcagacgc

SEQ ID NO: 2706 - DNA, 60 bp, Homo sapiens
  source 1..60: mol_type = genomic DNA
gagtctttctcttacccaaactcccccgcagtggggcagtgtgagaatcaaggatcaagg

SEQ ID NO: 2707 - DNA, 60 bp, Homo sapiens
  source 1..60: mol_type = genomic DNA
caccctttggcatcagtggactaaggagatttgggtaacaatctcagttataccacttgc

SEQ ID NO: 2708 - DNA, 60 bp, Homo sapiens
  source 1..60: mol_type = genomic DNA
tcactgcagagccaccaatgcaaagagtttcatatgtagaagggagtagaaaatacttac

SEQ ID NO: 2709 - DNA, 60 bp, Homo sapiens
  source 1..60: mol_type = genomic DNA
gtgctgtggccttgcgtgaatcacggtcttcaagggcttcagtctcatacaagccccatg

SEQ ID NO: 2710 - DNA, 60 bp, Homo sapiens
  source 1..60: mol_type = genomic DNA
tcggcatctgccactcagaatgtctgaggcgacatgtctagctcttctttacccagtaaa

SEQ ID NO: 2711 - DNA, 60 bp, Homo sapiens
  source 1..60: mol_type = genomic DNA
tgcacacgctctacctctacacaaatcgaggtctgcttacagtggagtgccaaccaagaa

SEQ ID NO: 2712 - DNA, 60 bp, Homo sapiens
  source 1..60: mol_type = genomic DNA
tttttgagcattttatctgaggtctccagaccataatatggagaaataaatgccctggaa

SEQ ID NO: 2713 - DNA, 60 bp, Homo sapiens
  source 1..60: mol_type = genomic DNA
agacccatctgcccaccgccctgctggcaccagcatagcaacaatgaacaatggtgtgga

SEQ ID NO: 2714 - DNA, 60 bp, Homo sapiens
  source 1..60: mol_type = genomic DNA
gtgtgcacacacaccccatctctgagaatgcaggtgttgcctttctctggcccatctttt

SEQ ID NO: 2715 - DNA, 60 bp, Homo sapiens
  source 1..60: mol_type = genomic DNA
tgcccacctcctaacaggggccaagccaagtgctaaccacaggtcatccaagttttctgc

SEQ ID NO: 2716 - DNA, 60 bp, Homo sapiens
  source 1..60: mol_type = genomic DNA
aatacaccacaccactggtcaatgacatgtagccatcatgggggatggcagccctgaacc

SEQ ID NO: 2717 - DNA, 60 bp, Homo sapiens
  source 1..60: mol_type = genomic DNA
aaggtacattgtcagggcttgcggactgcataaatatctgaataaatcaacgaatgatca

SEQ ID NO: 2718 - DNA, 60 bp, Homo sapiens
  source 1..60: mol_type = genomic DNA
ttctaaagacacttttactcacaaatgaatctttagccttctcccccatagtctggagac

SEQ ID NO: 2719 - DNA, 60 bp, Homo sapiens
  source 1..60: mol_type = genomic DNA
tgcaaagacacagacacacacgggacacaagtgagcatagagtcggctgaggaggtgtca

SEQ ID NO: 2720 - DNA, 60 bp, Homo sapiens
  source 1..60: mol_type = genomic DNA
tatctgttggcactctgaggtcactctcacacccactgtcattatctgttccctgtaatt

SEQ ID NO: 2721 - DNA, 60 bp, Homo sapiens
  source 1..60: mol_type = genomic DNA
tgcacacacacttccttggaacagtccacagctctctgattaatcacatgtgtacagtac

SEQ ID NO: 2722 - DNA, 60 bp, Homo sapiens
  source 1..60: mol_type = genomic DNA
agccttggacacaacgatcaaaaggatcctaaagccaagatggcaccacgtgttccagca

SEQ ID NO: 2723 - DNA, 60 bp, Homo sapiens
  source 1..60: mol_type = genomic DNA
gtctagtggctagtgacccggcacacaataaagcccaaaggtaacacaagtttgtttgca

SEQ ID NO: 2724 - DNA, 60 bp, Homo sapiens
  source 1..60: mol_type = genomic DNA
gcacacacacaaatcctgtaccaacagcctgtgcagttcaatcttatttgattgcctttt

SEQ ID NO: 2725 - DNA, 60 bp, Homo sapiens
  source 1..60: mol_type = genomic DNA
gacgtaaacaatatccaacagcaagaaatctggccaactcactgtgtacatctttaaaca

SEQ ID NO: 2726 - DNA, 60 bp, Homo sapiens
  source 1..60: mol_type = genomic DNA
tttgttgaaggagtaatggggttcaagagcactttagtaacccatctgcctttttggtca

SEQ ID NO: 2727 - DNA, 60 bp, Homo sapiens
  source 1..60: mol_type = genomic DNA
tctcagagtgggcaagggtcccatgagatgacactcatacattcctggtgaaaatagaga

SEQ ID NO: 2728 - DNA, 60 bp, Homo sapiens
  source 1..60: mol_type = genomic DNA
cccataaccagagtcccagagcatctacatttgtccttaggatccattgccacgccttat

SEQ ID NO: 2729 - DNA, 60 bp, Homo sapiens
  source 1..60: mol_type = genomic DNA
tacagatagacacaaatgcacagaattcagccacaagcctgtgatgttgataccatcaga

SEQ ID NO: 2730 - DNA, 60 bp, Homo sapiens
  source 1..60: mol_type = genomic DNA
tacacacacacgtgtgctggaaattctagcagggaagatgcaacaattccacccttgttg

SEQ ID NO: 2731 - DNA, 60 bp, Homo sapiens
  source 1..60: mol_type = genomic DNA
tcacgcactttgtgaacaaaatcacagcagcaaaagctatcagagaaatatgccatggac

SEQ ID NO: 2732 - DNA, 60 bp, Homo sapiens
  source 1..60: mol_type = genomic DNA
cacagtctgtcctggagaaacttcagaaggaagggacatcacagctttgagcctctgctc

SEQ ID NO: 2733 - DNA, 60 bp, Homo sapiens
  source 1..60: mol_type = genomic DNA
ccagaccaagcagataacacaggtatctgtgttttgagggagtggtcatcagaagtaatg

SEQ ID NO: 2734 - DNA, 60 bp, Homo sapiens
  source 1..60: mol_type = genomic DNA
tcatctccacacgtccaaatccatttcacaaaaatcaaaagcccagctgaaattccatct

SEQ ID NO: 2735 - DNA, 60 bp, Homo sapiens
  source 1..60: mol_type = genomic DNA
ccatcaccccaacacatgtgcccgaacaaatgagcaaggctgggatgtgttcatcagcct

SEQ ID NO: 2736 - DNA, 60 bp, Homo sapiens
  source 1..60: mol_type = genomic DNA
gagctgacaataccatatggcaatcactgtgtggtctgtgcatctgtgcacacaaatgtc

SEQ ID NO: 2737 - DNA, 60 bp, Homo sapiens
  source 1..60: mol_type = genomic DNA
ggtggggtcggggggcttctgcagcaggtgttgaaatgttgacatggatgggggctctaa

SEQ ID NO: 2738 - DNA, 60 bp, Homo sapiens
  source 1..60: mol_type = genomic DNA
ggaggagaaatctcacttttctccatgagttttttctcttgggctgagactggatactgc

SEQ ID NO: 2739 - DNA, 60 bp, Homo sapiens
  source 1..60: mol_type = genomic DNA
caggaccaaggttttcctctcaactgcctgttcctccactggagctgggaatttgaggga

SEQ ID NO: 2740 - DNA, 60 bp, Homo sapiens
  source 1..60: mol_type = genomic DNA
cctaatgttgggacctacactgccctgttagatatgttcccttgccctgtttttttgtag

SEQ ID NO: 2741 - DNA, 60 bp, Homo sapiens
  source 1..60: mol_type = genomic DNA
tttaaaatagtgcagtttgggatcagaaaaaaaaggcaaaaatggcaatgtcacatctgg

SEQ ID NO: 2742 - DNA, 60 bp, Homo sapiens
  source 1..60: mol_type = genomic DNA
aatttgtctctcctagacactacgcctctatgtgtaatatttgcctggggccagggtggt

SEQ ID NO: 2743 - DNA, 60 bp, Homo sapiens
  source 1..60: mol_type = genomic DNA
tctcacacatacagactccctcactgaccttatgggccctttgctctgctaaacacatag

SEQ ID NO: 2744 - DNA, 60 bp, Homo sapiens
  source 1..60: mol_type = genomic DNA
aaggaatacttgcatagctggcaaaattaagttctatgatttgcactactgccacattct

SEQ ID NO: 2745 - DNA, 60 bp, Homo sapiens
  source 1..60: mol_type = genomic DNA
cccaatcaatcaccaatttatctggtgaatacaagtaattgacatgtacttactccttga

SEQ ID NO: 2746 - DNA, 60 bp, Homo sapiens
  source 1..60: mol_type = genomic DNA
ccccctgtatctcacaccccttctttctctcctacttcccctccccttcaagaaaacatt

SEQ ID NO: 2747 - DNA, 60 bp, Homo sapiens
  source 1..60: mol_type = genomic DNA
ggtgtacatacgccctgcccacgtgtaatgccacgtccacccgcaagttcagtcacgtaa

SEQ ID NO: 2748 - DNA, 60 bp, Homo sapiens
  source 1..60: mol_type = genomic DNA
gaacctattgaagattctgattaaaggtttctgaagggtgaataccaggagacaaggaag

SEQ ID NO: 2749 - DNA, 60 bp, Homo sapiens
  source 1..60: mol_type = genomic DNA
gaactcatattttttctctcataatttggctttggaatattaaatttaagtatcccgttg

SEQ ID NO: 2750 - DNA, 60 bp, Homo sapiens
  source 1..60: mol_type = genomic DNA
tatatatcctattgatcctactgtaacccttctcatccaaggtacattggataccatatg

SEQ ID NO: 2751 - DNA, 60 bp, Homo sapiens
  source 1..60: mol_type = genomic DNA
cagaattatggctacatctttattttgggatgctacagtgcagtcctgtggtcagagtgg

SEQ ID NO: 2752 - DNA, 60 bp, Homo sapiens
  source 1..60: mol_type = genomic DNA
tcacacacatgccacatttctactaccctgtctgaccacctaacattaattgctaagaat

SEQ ID NO: 2753 - DNA, 60 bp, Homo sapiens
  source 1..60: mol_type = genomic DNA
cctccaagaaataaacatagcaaagcattgctgtttaattaaactaaacacaaggtttgc

SEQ ID NO: 2754 - DNA, 60 bp, Homo sapiens
  source 1..60: mol_type = genomic DNA
ttaaacgaaggatctggtgcctttaaattcagaattatgaaaagagaagtcttggaagta

SEQ ID NO: 2755 - DNA, 60 bp, Homo sapiens
  source 1..60: mol_type = genomic DNA
tctcccagtaggatttaagaaggagtaaagagtcttacctttctcccaaatctgcttccg

SEQ ID NO: 2756 - DNA, 60 bp, Homo sapiens
  source 1..60: mol_type = genomic DNA
atttatctgctcgtggttcattgtccatttccttgtcattagcgtgcaagtcccttgaaa

SEQ ID NO: 2757 - DNA, 60 bp, Homo sapiens
  source 1..60: mol_type = genomic DNA
gagactgcatgatggaaggcaacttctccacctcccggagtctgcttaataggaaacagg

SEQ ID NO: 2758 - DNA, 60 bp, Homo sapiens
  source 1..60: mol_type = genomic DNA
gtcattagttcaaatcaagagaaaaagggcaaaggtgtcaggagtgattttgttgccact

SEQ ID NO: 2759 - DNA, 60 bp, Homo sapiens
  source 1..60: mol_type = genomic DNA
tcacacacactttagtcaaaatggaaataaacaagtatgcccttcttcctgctttactct

SEQ ID NO: 2760 - DNA, 60 bp, Homo sapiens
  source 1..60: mol_type = genomic DNA
tcaattcagtgaattcatgcactgcattcagcatgtttacatttcaggaccttcagtaat

SEQ ID NO: 2761 - DNA, 60 bp, Homo sapiens
  source 1..60: mol_type = genomic DNA
aatgcaaagaagtaggcattttattcagtccatcagagagtggcttcaagaatacttgtt

SEQ ID NO: 2762 - DNA, 60 bp, Homo sapiens
  source 1..60: mol_type = genomic DNA
cctgaactctcagtaatatactacagatttcataatatagtacaaatgaagcgacctgtt

SEQ ID NO: 2763 - DNA, 60 bp, Homo sapiens
  source 1..60: mol_type = genomic DNA
aaaatcaactaaacaggcaataagattgtgaagatagccacagagggctttggttgcaat

SEQ ID NO: 2764 - DNA, 60 bp, Homo sapiens
  source 1..60: mol_type = genomic DNA
tacacacacaagttatattggttttatttccctccatgataaatatccaatgtaagtctc

SEQ ID NO: 2765 - DNA, 60 bp, Homo sapiens
  source 1..60: mol_type = genomic DNA
cagcaaacttgggatagagacagagctgaaggtaaagcaacaggactgtcctctctacgt

SEQ ID NO: 2766 - DNA, 60 bp, Homo sapiens
  source 1..60: mol_type = genomic DNA
aatacagaaacatacacatacgtaaaatgcccagatgtaggcagaactagtgtggcgtta

SEQ ID NO: 2767 - DNA, 60 bp, Homo sapiens
  source 1..60: mol_type = genomic DNA
tatgtagccccattagtaagcttctaataaaagagtgaaaaaatagtagagctaatttaa

SEQ ID NO: 2768 - DNA, 60 bp, Homo sapiens
  source 1..60: mol_type = genomic DNA
gattcctcttgagcaatcagaagacagagtgagatgacactgctctgccattcctgcagg

SEQ ID NO: 2769 - DNA, 60 bp, Homo sapiens
  source 1..60: mol_type = genomic DNA
gcacacacatgtacgaatgatctaaatttcttcaaagaacaacttgtacaacgaagattt

SEQ ID NO: 2770 - DNA, 60 bp, Homo sapiens
  source 1..60: mol_type = genomic DNA
gcgtagccctgcgcttgcacctccatgcctgtgtacccctgtgtcgccagacacatgtgt

SEQ ID NO: 2771 - DNA, 60 bp, Homo sapiens
  source 1..60: mol_type = genomic DNA
gaacaccgcacagcacccagacacttggaagcagcgggcacagacgcggcacactcagac

SEQ ID NO: 2772 - DNA, 60 bp, Homo sapiens
  source 1..60: mol_type = genomic DNA
ctgttcaagtgtgtgtgccagtgctcagtgaggaccatctccccaacctgtctgatcatc

SEQ ID NO: 2773 - DNA, 60 bp, Homo sapiens
  source 1..60: mol_type = genomic DNA
aacacacacagtgcctactgcgggcaaacagctggccaggcagcctgggaggtgtcccat

SEQ ID NO: 2774 - DNA, 60 bp, Homo sapiens
  source 1..60: mol_type = genomic DNA
cctcaccatgtactgcccaggccgggccaggccttctattccctcggcatccaggaatct

SEQ ID NO: 2775 - DNA, 60 bp, Homo sapiens
  source 1..60: mol_type = genomic DNA
tgcagagcatgggaaacgccagtccccaagaaggagctctgtggtcatcacatcctcaga

SEQ ID NO: 2776 - DNA, 60 bp, Homo sapiens
  source 1..60: mol_type = genomic DNA
gtcacactcacacatgtgttttctgggcagctccatgtctgctaattcggctaatgacag

SEQ ID NO: 2777 - DNA, 60 bp, Homo sapiens
  source 1..60: mol_type = genomic DNA
gagtgacagtgaagtcctgactccagcattaattctgccttatccatacctgaccttgaa

SEQ ID NO: 2778 - DNA, 60 bp, Homo sapiens
  source 1..60: mol_type = genomic DNA
tgcaagacagtttgtggaaccctgaaatgggaacaaaggaggccatagtcactgcttcga

SEQ ID NO: 2779 - DNA, 60 bp, Homo sapiens
  source 1..60: mol_type = genomic DNA
aatgctgaaaacaactgttcttggagagtaaatatatgaggactaatatatacttcacaa

SEQ ID NO: 2780 - DNA, 60 bp, Homo sapiens
  source 1..60: mol_type = genomic DNA
acatacaaatcagcatattatttctagcattaattgcctaaggtttaaggtgttgaggac

SEQ ID NO: 2781 - DNA, 60 bp, Homo sapiens
  source 1..60: mol_type = genomic DNA
cattaagctttctcttttctgccatcttgggtttccatatctatgggatgaaatcatgca

SEQ ID NO: 2782 - DNA, 60 bp, Homo sapiens
  source 1..60: mol_type = genomic DNA
aacaagcactggtgttcagagttacaacttttatgccctttggggtcccatttagctttt

SEQ ID NO: 2783 - DNA, 60 bp, Homo sapiens
  source 1..60: mol_type = genomic DNA
atgagatcatggtcttatgggacaggttccggagtcggacagctctcagctcaagtccta

SEQ ID NO: 2784 - DNA, 60 bp, Homo sapiens
  source 1..60: mol_type = genomic DNA
gtagtcaagcagaaggcgtttggatgagaatacacaaggaagtccagcttccttgaacaa

SEQ ID NO: 2785 - DNA, 60 bp, Homo sapiens
  source 1..60: mol_type = genomic DNA
aatatattatgatctatgaacccaccctgtactccagaatgccaaatataatgatttcca

SEQ ID NO: 2786 - DNA, 60 bp, Homo sapiens
  source 1..60: mol_type = genomic DNA
atccccgcagattttgtcttctattcataatcatcagagtttgaaattagggagtgagcc

SEQ ID NO: 2787 - DNA, 60 bp, Homo sapiens
  source 1..60: mol_type = genomic DNA
aaattttggtgtcaaaacatccacattttcttcaatttatgttagaaatttctgtggcac

SEQ ID NO: 2788 - DNA, 60 bp, Homo sapiens
  source 1..60: mol_type = genomic DNA
ttccatgctcttgctgtgggtaagttcttgacaaaccacttccctggtctcggattcctc

SEQ ID NO: 2789 - DNA, 60 bp, Homo sapiens
  source 1..60: mol_type = genomic DNA
cccggcaccacaccacaccactcctccccctaccctcacaatgaccctgaggaatcctag

SEQ ID NO: 2790 - DNA, 60 bp, Homo sapiens
  source 1..60: mol_type = genomic DNA
tctctctctctcctatacactcccagtagatcacagacatggttgcctatggacatcagg

SEQ ID NO: 2791 - DNA, 60 bp, Homo sapiens
  source 1..60: mol_type = genomic DNA
gatgtggacctccgatcagggatgctgcccacgtggagcttggcaagccctgcctcttac

SEQ ID NO: 2792 - DNA, 60 bp, Homo sapiens
  source 1..60: mol_type = genomic DNA
gcttagttagattgatagtgctaagcattggtcagaaaagtttgcagattaattgacaaa

SEQ ID NO: 2793 - DNA, 60 bp, Homo sapiens
  source 1..60: mol_type = genomic DNA
ttgcagaggattttatacgaaggaaactggtgaggtcaatgatttgtatctgcaattcgg

SEQ ID NO: 2794 - DNA, 60 bp, Homo sapiens
  source 1..60: mol_type = genomic DNA
taactcaaagtggctgtctgtactgatcactatcactaacgagtggttatctatggttca

SEQ ID NO: 2795 - DNA, 60 bp, Homo sapiens
  source 1..60: mol_type = genomic DNA
gtcactagtctgaatgtcagagatagtagtaccttgcatcaactctgaataaaggttgtt

SEQ ID NO: 2796 - DNA, 60 bp, Homo sapiens
  source 1..60: mol_type = genomic DNA
tgagctgtcctgagtagccaaaacagctgacagaaaggtattgagatcctgtgtttcaca

SEQ ID NO: 2797 - DNA, 60 bp, Homo sapiens
  source 1..60: mol_type = genomic DNA
cacccctcttctagaagtatgccatgctctagaattatctactcttctttccccagcaaa

SEQ ID NO: 2798 - DNA, 60 bp, Homo sapiens
  source 1..60: mol_type = genomic DNA
atccacattgaaaatgtgtgtctccttggtgtttctccctaaggcagcatagatttcctt

SEQ ID NO: 2799 - DNA, 60 bp, Homo sapiens
  source 1..60: mol_type = genomic DNA
cccacccaaataatggcttatcttccaaagcactgggaaaattaaagcaaagaaagcata

SEQ ID NO: 2800 - DNA, 60 bp, Homo sapiens
  source 1..60: mol_type = genomic DNA
tgctcaatcagtgtggggtgaatggagggaaatgcagtcctggtgagggcagaggagggc

SEQ ID NO: 2801 - DNA, 60 bp, Homo sapiens
  source 1..60: mol_type = genomic DNA
gcacgcacaaaaatctccatttctaactataaaattcagtgtattcctgtcaatacttct

SEQ ID NO: 2802 - DNA, 60 bp, Homo sapiens
  source 1..60: mol_type = genomic DNA
gctttgtcccttgatcctgtgtcctccttcaactcttagattatctttccttgaaaagcc

SEQ ID NO: 2803 - DNA, 60 bp, Homo sapiens
  source 1..60: mol_type = genomic DNA
ctacctttatatgccagcttatctctgcaagggggataattaatcattaaactagtgatt

SEQ ID NO: 2804 - DNA, 60 bp, Homo sapiens
  source 1..60: mol_type = genomic DNA
ccaagagcacacacttcttcttacgtttaatcgcgaggttaatcgaaaacaaacatgaag

SEQ ID NO: 2805 - DNA, 60 bp, Homo sapiens
  source 1..60: mol_type = genomic DNA
tgaagatgggtgtgcacacgtggggcttcatgcagacatacccaggaagatcttgcgggt

SEQ ID NO: 2806 - DNA, 60 bp, Homo sapiens
  source 1..60: mol_type = genomic DNA
cccaacctatccctaaaagatggaacagtgctaatctatatttgaatttgaaaaataact

SEQ ID NO: 2807 - DNA, 60 bp, Homo sapiens
  source 1..60: mol_type = genomic DNA
tacacattttcaacactggtagaagggaatgattatcctgtttctcccaaagacacttgt

SEQ ID NO: 2808 - DNA, 60 bp, Homo sapiens
  source 1..60: mol_type = genomic DNA
cccacccaaatggttggttcacgtcccatgaagatggaaataactctatcttcttttatg

SEQ ID NO: 2809 - DNA, 60 bp, Homo sapiens
  source 1..60: mol_type = genomic DNA
tatgcacactttttttacctaaaatttcaggggcttaaagattctctgagggatcagtca

SEQ ID NO: 2810 - DNA, 60 bp, Homo sapiens
  source 1..60: mol_type = genomic DNA
cctcactcctatgaagcacatgcctacattctacatttctgcctcaaagggtggaagaca

SEQ ID NO: 2811 - DNA, 60 bp, Homo sapiens
  source 1..60: mol_type = genomic DNA
tacatcctgaaaggatgtgccacaaatgtggaaggtgttgatggctggaggaacggatat

SEQ ID NO: 2812 - DNA, 60 bp, Homo sapiens
  source 1..60: mol_type = genomic DNA
gaaagttatcttccaaaattctgttcaaagttaatcttcccttagaaaccttccaagtgt

SEQ ID NO: 2813 - DNA, 60 bp, Homo sapiens
  source 1..60: mol_type = genomic DNA
atacttttatagactaattttctctctgggtggctctcacataccaagcaaataaacaca

SEQ ID NO: 2814 - DNA, 60 bp, Homo sapiens
  source 1..60: mol_type = genomic DNA
cctcgcacgtgcatgcacgcgcactggccagctgacctcaaaacacatctcttgccccta

SEQ ID NO: 2815 - DNA, 60 bp, Homo sapiens
  source 1..60: mol_type = genomic DNA
ggaactctcagatggcaccttccttcctcacagagaacaattctgatcaaatccacactg

SEQ ID NO: 2816 - DNA, 60 bp, Homo sapiens
  source 1..60: mol_type = genomic DNA
cccaaggggaagaaaagctatttttcgtcccagattgcatttccttttctgaaacctcca

SEQ ID NO: 2817 - DNA, 60 bp, Homo sapiens
  source 1..60: mol_type = genomic DNA
ggatttaggataggcaggtagcgtgagtgaggaatagggtggggctgcaatagagaatgg

SEQ ID NO: 2818 - DNA, 60 bp, Homo sapiens
  source 1..60: mol_type = genomic DNA
gtagcagcagtggcagcagatgtgtatttttcatgtgaatgtgaagaaaactgctggaaa

SEQ ID NO: 2819 - DNA, 60 bp, Homo sapiens
  source 1..60: mol_type = genomic DNA
aatttagactttgaagttgggctcttaaacaattatatgtttcatataaaaaagtgcttt

SEQ ID NO: 2820 - DNA, 60 bp, Homo sapiens
  source 1..60: mol_type = genomic DNA
cttaaaatggtgttgagaaagatagctggatttcgatctcagacctctgggttctgatgc

SEQ ID NO: 2821 - DNA, 60 bp, Homo sapiens
  source 1..60: mol_type = genomic DNA
ctgcatgcttatggacacattctgcctccccctctctgctcaaccaccgctcatccatct

SEQ ID NO: 2822 - DNA, 60 bp, Homo sapiens
  source 1..60: mol_type = genomic DNA
aatgtggagaatcattagataccataaatctactcctggcttcacatttttggaaagaac

SEQ ID NO: 2823 - DNA, 60 bp, Homo sapiens
  source 1..60: mol_type = genomic DNA
tctgttacatctgtgctgcctttgttcctttgacccaaggcaacactgatttcatagtag

SEQ ID NO: 2824 - DNA, 60 bp, Homo sapiens
  source 1..60: mol_type = genomic DNA
gaacacacacactttagaaaaattgcaaagctctggaggctggctggtgaagcaaaaact

SEQ ID NO: 2825 - DNA, 60 bp, Homo sapiens
  source 1..60: mol_type = genomic DNA
gcacacccctatgtcctgtctgcatagtaattgctggccctattcatcttagctgatttt

SEQ ID NO: 2826 - DNA, 60 bp, Homo sapiens
  source 1..60: mol_type = genomic DNA
aaattcttgacacccaaccatgtatagactccagggctccatccccagtcttcctttttt

SEQ ID NO: 2827 - DNA, 60 bp, Homo sapiens
  source 1..60: mol_type = genomic DNA
gctcaaaattgcaaggagaagggagccagagctacctcatgactcacacacagccctgca

SEQ ID NO: 2828 - DNA, 60 bp, Homo sapiens
  source 1..60: mol_type = genomic DNA
gagcaccccatattatatacactaatgggttattgggttcttatgtaaataagtaactcc

SEQ ID NO: 2829 - DNA, 60 bp, Homo sapiens
  source 1..60: mol_type = genomic DNA
cacacacacccctaccttgatcccactgataaaatcccagctaatccactgtactgggct

SEQ ID NO: 2830 - DNA, 60 bp, Homo sapiens
  source 1..60: mol_type = genomic DNA
tgctgctgcagcttggatgagggaagaggttggtagattcagctgtgctgggcatcctgg

SEQ ID NO: 2831 - DNA, 60 bp, Homo sapiens
  source 1..60: mol_type = genomic DNA
tatacacatacatcagccataaacaccccgaataaatagcaagggaaagtgaggatatgc

SEQ ID NO: 2832 - DNA, 60 bp, Homo sapiens
  source 1..60: mol_type = genomic DNA
aaaaatgacatttatcctatgttctgacctgtctctcacacattatagctagtttatcat

SEQ ID NO: 2833 - DNA, 60 bp, Homo sapiens
  source 1..60: mol_type = genomic DNA
tcacacactcattcactgtactagctaaaaccagcgtccctcacctgccaatctgcttag

SEQ ID NO: 2834 - DNA, 60 bp, Homo sapiens
  source 1..60: mol_type = genomic DNA
caacaatatccaacaggatggtgtaaataaatagtggtcccagtaccattattttttgtt

SEQ ID NO: 2835 - DNA, 60 bp, Homo sapiens
  source 1..60: mol_type = genomic DNA
ggcatgcatgcactccatagcatgtaattctgtaccaaccatgacacatcaaagcagaaa

SEQ ID NO: 2836 - DNA, 60 bp, Homo sapiens
  source 1..60: mol_type = genomic DNA
tacacacacacgctttaagctgcagctaacagaaacttggaaatccttgcaccgtttgga

SEQ ID NO: 2837 - DNA, 60 bp, Homo sapiens
  source 1..60: mol_type = genomic DNA
tgccatctgtcatggacataaaggaatatatcaatggataaagttagcaaagtctttgct

SEQ ID NO: 2838 - DNA, 60 bp, Homo sapiens
  source 1..60: mol_type = genomic DNA
tcttcattctatagctcaagtcttctagaaaacagtaataagactgccttgccccctcat

SEQ ID NO: 2839 - DNA, 60 bp, Homo sapiens
  source 1..60: mol_type = genomic DNA
aaactgcaggaatttcagttcagattatatagatatatggattagcctagcaaaattgac

SEQ ID NO: 2840 - DNA, 60 bp, Homo sapiens
  source 1..60: mol_type = genomic DNA
aatatgtcttctaccacacatatactagggaccaaagatagcactattaatctggaatga

SEQ ID NO: 2841 - DNA, 60 bp, Homo sapiens
  source 1..60: mol_type = genomic DNA
accatccttgcatgccactcctggggacatctgctctgagagggacttaagacatcatct

SEQ ID NO: 2842 - DNA, 60 bp, Homo sapiens
  source 1..60: mol_type = genomic DNA
gcacgcacgcacgtacctgtgtcagctttggtaccgtgctccatgattgtctgactgtgt

SEQ ID NO: 2843 - DNA, 60 bp, Homo sapiens
  source 1..60: mol_type = genomic DNA
tcacctctgcagagatatgcatgcagaagaacattcacaagagactggagtgggaagaca

SEQ ID NO: 2844 - DNA, 60 bp, Homo sapiens
  source 1..60: mol_type = genomic DNA
ctgtgtagtgtgctgccgggtgctgcatttgaacctgactccagccgcagctccaggaca

SEQ ID NO: 2845 - DNA, 60 bp, Homo sapiens
  source 1..60: mol_type = genomic DNA
gttgcaggcacttatgatggaatagatgttaatgctgctgctgacaccaaaaactccaat

SEQ ID NO: 2846 - DNA, 60 bp, Homo sapiens
  source 1..60: mol_type = genomic DNA
gtatggggaagatactgaaggcacagattggtgaatctatctttatataaagagcatgtt

SEQ ID NO: 2847 - DNA, 60 bp, Homo sapiens
  source 1..60: mol_type = genomic DNA
aaactgtgcagggaaattacatacataaactttttgggatggaagagggagtaaagaatg

SEQ ID NO: 2848 - DNA, 60 bp, Homo sapiens
  source 1..60: mol_type = genomic DNA
tgagaaggcagtcagtgactaccttccattttccaaccacaaactgctgtcagaatgaat

SEQ ID NO: 2849 - DNA, 60 bp, Homo sapiens
  source 1..60: mol_type = genomic DNA
ctgaatatgtgtctgacgagggaactgggtggcccaggacaggagtgggagaaagacttt

SEQ ID NO: 2850 - DNA, 60 bp, Homo sapiens
  source 1..60: mol_type = genomic DNA
catatacacacccctggctctctacctagaatgtccgactcatcaggagcaagttgcatg

SEQ ID NO: 2851 - DNA, 60 bp, Homo sapiens
  source 1..60: mol_type = genomic DNA
gtctctgtacgtgttgtttctagttgttgattgttattttctctgctgccacgatcatga

SEQ ID NO: 2852 - DNA, 60 bp, Homo sapiens
  source 1..60: mol_type = genomic DNA
tacacacactggaggcagaaaaggtaacttggaaatgactcacactgtctgcccaacctg

SEQ ID NO: 2853 - DNA, 60 bp, Homo sapiens
  source 1..60: mol_type = genomic DNA
atctctgatcctcctgctgacacgtggctcattaatcacactccacagctcacattgtcc

SEQ ID NO: 2854 - DNA, 60 bp, Homo sapiens
  source 1..60: mol_type = genomic DNA
gcatgatatatacaccccatgtttcacattactttagctaagggtagtgagatggccaca

SEQ ID NO: 2855 - DNA, 60 bp, Homo sapiens
  source 1..60: mol_type = genomic DNA
aactacttttgatttgtctgcctctcctctaaccctcttccatcctaaatttccagtacc

SEQ ID NO: 2856 - DNA, 60 bp, Homo sapiens
  source 1..60: mol_type = genomic DNA
ccctatgcgtacaatttcggagcaattgtgcattcattcagtgaatacctatttaatgca

SEQ ID NO: 2857 - DNA, 60 bp, Homo sapiens
  source 1..60: mol_type = genomic DNA
aatgcacaaactggaggatgattgaagaaatcaggctacatccctaaacatgtatgtatg

SEQ ID NO: 2858 - DNA, 60 bp, Homo sapiens
  source 1..60: mol_type = genomic DNA
gacccaaatacagtacaactggtccatgatttagtctaagtagccattttctatgaacca

SEQ ID NO: 2859 - DNA, 60 bp, Homo sapiens
  source 1..60: mol_type = genomic DNA
ttttcttattcagtgatcagagctcttggtccattcttcaatcgccactattctgcctgc

SEQ ID NO: 2860 - DNA, 60 bp, Homo sapiens
  source 1..60: mol_type = genomic DNA
taaagccattacttcttctgcgatggatgtcaaaatctccaacccggtcttcacaataat

SEQ ID NO: 2861 - DNA, 60 bp, Homo sapiens
  source 1..60: mol_type = genomic DNA
aatggaaagtttccctaggggtacaaagatacttcacattgaaccaaaattaaaaaccag

SEQ ID NO: 2862 - DNA, 60 bp, Homo sapiens
  source 1..60: mol_type = genomic DNA
ggggtcagccctgctcaccccaacctcaaagtctccctcatgtttatatgccaatattgc

SEQ ID NO: 2863 - DNA, 60 bp, Homo sapiens
  source 1..60: mol_type = genomic DNA
ccatctagctgttctccttttgaaaggaggagatgagaggacacacaaggtgtattgtgc

SEQ ID NO: 2864 - DNA, 60 bp, Homo sapiens
  source 1..60: mol_type = genomic DNA
gcccgagtgtggtgcctcacgtgggctgccccgtgcctacccacagccacagaccccgca

SEQ ID NO: 2865 - DNA, 60 bp, Homo sapiens
  source 1..60: mol_type = genomic DNA
tatgaaagccgtgatttaatatgcaaaaacagttgctaaaaatgcaaatatttcaacaaa

SEQ ID NO: 2866 - DNA, 60 bp, Homo sapiens
  source 1..60: mol_type = genomic DNA
ttttacccagttatagcatatactgtgatgaagtcaggcgattaaagtcccttttgagac

SEQ ID NO: 2867 - DNA, 60 bp, Homo sapiens
  source 1..60: mol_type = genomic DNA
ctgatctgcctagatgtgaaattaaacttctagagcacacgcatatacacaacgccagac

SEQ ID NO: 2868 - DNA, 60 bp, Homo sapiens
  source 1..60: mol_type = genomic DNA
ctctgcatcctccagattctcttaaggatcaatctctgtgagctctttcgagatcccact

SEQ ID NO: 2869 - DNA, 60 bp, Homo sapiens
  source 1..60: mol_type = genomic DNA
tacatatatatagtccttattcatcttgctgtgtggggatatcccttagttcaattttgg

SEQ ID NO: 2870 - DNA, 60 bp, Homo sapiens
  source 1..60: mol_type = genomic DNA
ctatcatataattatattctttctgagtctttatactctgctgtgatttcctttatgtct

SEQ ID NO: 2871 - DNA, 60 bp, Homo sapiens
  source 1..60: mol_type = genomic DNA
aaatggaactgaacaaaagtcactacttaatactttctaaattgcctcttttggaggtac

SEQ ID NO: 2872 - DNA, 60 bp, Homo sapiens
  source 1..60: mol_type = genomic DNA
aaatcacagaagacagttaaaagtatactctgtgtgtcaaatagcatcttcacacagcct

SEQ ID NO: 2873 - DNA, 60 bp, Homo sapiens
  source 1..60: mol_type = genomic DNA
tatacatacagaccacgcacttcaggacgaaggtcagaatccaggtctaatcatttaagt

SEQ ID NO: 2874 - DNA, 60 bp, Homo sapiens
  source 1..60: mol_type = genomic DNA
atctgagtaaagactcactaaaatggactagatttgagggttcagtatcttaaagagaaa

SEQ ID NO: 2875 - DNA, 60 bp, Homo sapiens
  source 1..60: mol_type = genomic DNA
tccacacacacacgcagctgtggctctggggtccctgatggcaccacgcaaagtaccaga

SEQ ID NO: 2876 - DNA, 60 bp, Homo sapiens
  source 1..60: mol_type = genomic DNA
aacacgcacacaccacatcattatagcaagtggaacacaaaaccaaatgagtgctcagca

SEQ ID NO: 2877 - DNA, 60 bp, Homo sapiens
  source 1..60: mol_type = genomic DNA
cccctctgtgttggctgaaggtggagtgaaactggcctaaccccactgtcctccaggggg

SEQ ID NO: 2878 - DNA, 60 bp, Homo sapiens
  source 1..60: mol_type = genomic DNA
gccacaaggagacacagacaaggcagggtaggatgagtggaagctaggagcagatgctga

SEQ ID NO: 2879 - DNA, 60 bp, Homo sapiens
  source 1..60: mol_type = genomic DNA
ccacaccctacaactcctcccaagcaacatagcgagagaatgcaaatatagctgactaca

SEQ ID NO: 2880 - DNA, 60 bp, Homo sapiens
  source 1..60: mol_type = genomic DNA
cccttgaatatagtgtctcataaccatgaagtctgagatggtcttggaatcattagactc

SEQ ID NO: 2881 - DNA, 60 bp, Homo sapiens
  source 1..60: mol_type = genomic DNA
gtaagtgtgtgcatcatcactatatggacataatttccatgaaacactacttataccctt

SEQ ID NO: 2882 - DNA, 60 bp, Homo sapiens
  source 1..60: mol_type = genomic DNA
cgtggccctcttaggcaccagcaggcatggaagctgctggttcctcagcggtttctctct

SEQ ID NO: 2883 - DNA, 60 bp, Homo sapiens
  source 1..60: mol_type = genomic DNA
ctgccctttccttgaatcctttgctctctccccgtctcctagtggcattcattgtttcag

SEQ ID NO: 2884 - DNA, 60 bp, Homo sapiens
  source 1..60: mol_type = genomic DNA
aaaccacaaaggaataacatataattcaacccatagtgttggagatgtgtggtttcattg

SEQ ID NO: 2885 - DNA, 60 bp, Homo sapiens
  source 1..60: mol_type = genomic DNA
gcccacgcccacacacatacacctcatgaagtggctataggagcaatctaattggacaga

SEQ ID NO: 2886 - DNA, 60 bp, Homo sapiens
  source 1..60: mol_type = genomic DNA
atctactatttgctattaggtcaattgatcaccagctctagaaaagtggttatagggtat

SEQ ID NO: 2887 - DNA, 60 bp, Homo sapiens
  source 1..60: mol_type = genomic DNA
gagcaagctgatacaaactttctgaaagacggtcttccataaaaggagaggtactctaac

SEQ ID NO: 2888 - DNA, 60 bp, Homo sapiens
  source 1..60: mol_type = genomic DNA
tcacacaaacacaaacagtatatgcagcttttgtgctgatattgaactattatgactctt

SEQ ID NO: 2889 - DNA, 60 bp, Homo sapiens
  source 1..60: mol_type = genomic DNA
aaactagttctgagttgtatctggtctggcccagtattcaagtcacggcagggaaggagt

SEQ ID NO: 2890 - DNA, 60 bp, Homo sapiens
  source 1..60: mol_type = genomic DNA
gtcttaggctttcctacccagaatctattgctcaaattctgctgtagtaggagaaatgaa

SEQ ID NO: 2891 - DNA, 60 bp, Homo sapiens
  source 1..60: mol_type = genomic DNA
gaatagaggcaaggaaacgtcagtggaaaagccctctcctctcctctgcatgaattcctt

SEQ ID NO: 2892 - DNA, 60 bp, Homo sapiens
  source 1..60: mol_type = genomic DNA
tacacacacaggctaagatgtgctcatcattctattagaaaggaaatctcaaaatgcaaa

SEQ ID NO: 2893 - DNA, 60 bp, Homo sapiens
  source 1..60: mol_type = genomic DNA
aatccacagttggcaacactggtgaggacagaggcgtggaagcaatgcgacgcaaccccg

SEQ ID NO: 2894 - DNA, 60 bp, Homo sapiens
  source 1..60: mol_type = genomic DNA
tacacacatacagggatgtgtgaagagttacctaatcagatagactcagagattcctccg

SEQ ID NO: 2895 - DNA, 60 bp, Homo sapiens
  source 1..60: mol_type = genomic DNA
aagatacctcaaatgtagaagcaggtctgatgatgggctttgcagaaacaattccatgaa

SEQ ID NO: 2896 - DNA, 60 bp, Homo sapiens
  source 1..60: mol_type = genomic DNA
ctgtacccttcctagtgactgaataatctggtcttaaaataacaaaaggacatattaaaa

SEQ ID NO: 2897 - DNA, 60 bp, Homo sapiens
  source 1..60: mol_type = genomic DNA
tccaagatgtacctctggaaaaattcttagtctgatatactgtcactcctttgtgacccc

SEQ ID NO: 2898 - DNA, 60 bp, Homo sapiens
  source 1..60: mol_type = genomic DNA
gcacacacttctccaagggggctttactcaagagggtaggcacatcatagctcccactca

SEQ ID NO: 2899 - DNA, 60 bp, Homo sapiens
  source 1..60: mol_type = genomic DNA
tgcacacccaggtacatacacttcttgccaggtaaaaacaatcgatacacacatttccca

SEQ ID NO: 2900 - DNA, 60 bp, Homo sapiens
  source 1..60: mol_type = genomic DNA
actacctgctgggctagcagacccttctttacccatcagcagttaatacaatggcttgtt

SEQ ID NO: 2901 - DNA, 60 bp, Homo sapiens
  source 1..60: mol_type = genomic DNA
caaaagaacccagatatttttgcaaggctgtataaatgtatctttaagttaagcctcaag

SEQ ID NO: 2902 - DNA, 60 bp, Homo sapiens
  source 1..60: mol_type = genomic DNA
acctttgttgagttccttggaaacccaacagctcagagtatgaccttaggtcacttagta

SEQ ID NO: 2903 - DNA, 60 bp, Homo sapiens
  source 1..60: mol_type = genomic DNA
tggaatacattcagctggggcatctgaagacgaaagcccttccaggtgcaggtgctctcc

SEQ ID NO: 2904 - DNA, 60 bp, Homo sapiens
  source 1..60: mol_type = genomic DNA
gcttaacaagataaggataacgtaaactagacctttcttttgacttaatgtttttgttcc

SEQ ID NO: 2905 - DNA, 60 bp, Homo sapiens
  source 1..60: mol_type = genomic DNA
ggctcgtactcactacacctgtccaggacgtgttcactgctcctccgtgtgtgttagctc

SEQ ID NO: 2906 - DNA, 60 bp, Homo sapiens
  source 1..60: mol_type = genomic DNA
ataaagtctccattcctcatcactgtgccctgttgtcattaagtattgttggtactacct

SEQ ID NO: 2907 - DNA, 60 bp, Homo sapiens
  source 1..60: mol_type = genomic DNA
taacacacacgcaaagacagtgagggagcgagaggcgcatccccaggtagctgacaatga

SEQ ID NO: 2908 - DNA, 60 bp, Homo sapiens
  source 1..60: mol_type = genomic DNA
cccacatttcatacttcaagcagttttggcattgttctggaatggcatgtcagagcacca

SEQ ID NO: 2909 - DNA, 60 bp, Homo sapiens
  source 1..60: mol_type = genomic DNA
caaaaccccgcaaaaaggaaacttcattaggaagggaaggttacctgcaaagctcttcat

SEQ ID NO: 2910 - DNA, 60 bp, Homo sapiens
  source 1..60: mol_type = genomic DNA
tcacacaacatgaatattttatctgttaaatattgatttccttttttgtgcccattgcat

SEQ ID NO: 2911 - DNA, 60 bp, Homo sapiens
  source 1..60: mol_type = genomic DNA
gcaatatttggcaaatgccaggagggagtaatcagcttaacactgaaacaacaaggattg

SEQ ID NO: 2912 - DNA, 60 bp, Homo sapiens
  source 1..60: mol_type = genomic DNA
ccccctctgacctcatgtatcactctcacactcactctgttccagttgttcaaagacttc

SEQ ID NO: 2913 - DNA, 60 bp, Homo sapiens
  source 1..60: mol_type = genomic DNA
gcacacacacacgcgcgtgccacgctctctctctttcaacccaagggtgacagagtgaaa

SEQ ID NO: 2914 - DNA, 60 bp, Homo sapiens
  source 1..60: mol_type = genomic DNA
gcacacacgctcaaagagtagggagagaaaaattatgattggggaaatcaataaaagcat

SEQ ID NO: 2915 - DNA, 60 bp, Homo sapiens
  source 1..60: mol_type = genomic DNA
gacccccatgagttgcaactctttagacagaaaggtaaacaaatcattcaattatcatca

SEQ ID NO: 2916 - DNA, 60 bp, Homo sapiens
  source 1..60: mol_type = genomic DNA
tatgcatccacgataacatagttcaatgggtgattggctcaggatataaatgacattttt

SEQ ID NO: 2917 - DNA, 60 bp, Homo sapiens
  source 1..60: mol_type = genomic DNA
ggcaggcacgcacccttctcaggcagccacaagcctcttccctgggacctggctccattc

SEQ ID NO: 2918 - DNA, 60 bp, Homo sapiens
  source 1..60: mol_type = genomic DNA
taaccacacacacatttgttaaacaaaacgggaatggctcttttacttgtgatctgatac

SEQ ID NO: 2919 - DNA, 60 bp, Homo sapiens
  source 1..60: mol_type = genomic DNA
aatccaatctgggactatgcagagtcagagatggattagacaaaatctttgtcctaagga

SEQ ID NO: 2920 - DNA, 60 bp, Homo sapiens
  source 1..60: mol_type = genomic DNA
tgatctgtctgctactgacaactccatggctaacctggacagagtgtgttacagagccgg

SEQ ID NO: 2921 - DNA, 60 bp, Homo sapiens
  source 1..60: mol_type = genomic DNA
gcaatccaaattgtatttctgctccagccctgagctccagcatccacttgcaggtcttcc

SEQ ID NO: 2922 - DNA, 60 bp, Homo sapiens
  source 1..60: mol_type = genomic DNA
cacactcatatagaccaaacttgtgattttaactactaagaaattagattagaccgatga

SEQ ID NO: 2923 - DNA, 60 bp, Homo sapiens
  source 1..60: mol_type = genomic DNA
gcagtatgctgatgggcttgcttacaatcacctttttttaatgtatcagtatggcacctc

SEQ ID NO: 2924 - DNA, 60 bp, Homo sapiens
  source 1..60: mol_type = genomic DNA
aggtatctatatatgaaggcaagataacattacatgtaatattccaatgagtgtgttcac

SEQ ID NO: 2925 - DNA, 60 bp, Homo sapiens
  source 1..60: mol_type = genomic DNA
gatcagcatgacagaaggtggtgcccctcataggagaggtgctaaatggaagtacatgat

SEQ ID NO: 2926 - DNA, 60 bp, Homo sapiens
  source 1..60: mol_type = genomic DNA
acaaatgaacttaaatatgtttaagctggaagctgatatgattaaaatttatcatagaag

SEQ ID NO: 2927 - DNA, 60 bp, Homo sapiens
  source 1..60: mol_type = genomic DNA
aaaaaaattccatgcaagatgattgacctgaagcctgaaggaaattttatgtctaggaaa

SEQ ID NO: 2928 - DNA, 60 bp, Homo sapiens
  source 1..60: mol_type = genomic DNA
tactgtcatctaaatcatacccagtgtcctaggagagccaggcactcaagattaaattct

SEQ ID NO: 2929 - DNA, 60 bp, Homo sapiens
  source 1..60: mol_type = genomic DNA
catcacacataaagtatgatgttaccaagatttaaagaaatttgaacttacatacactgc

SEQ ID NO: 2930 - DNA, 60 bp, Homo sapiens
  source 1..60: mol_type = genomic DNA
ccctcacctctccataagcctgaatccttcagagctctgtctgagtttcagttccgggca

SEQ ID NO: 2931 - DNA, 60 bp, Homo sapiens
  source 1..60: mol_type = genomic DNA
gaatcacacacacaccggaattgctagttggcataatactattttgtagataattaagca

SEQ ID NO: 2932 - DNA, 60 bp, Homo sapiens
  source 1..60: mol_type = genomic DNA
tacacaccccaaacaggacttttattaagccaaggcaagggagtcagattatctgtcatc

SEQ ID NO: 2933 - DNA, 60 bp, Homo sapiens
  source 1..60: mol_type = genomic DNA
tgctagcattctgcctacacacttacaaacacatacacagattcctcaagtctacgttgt

SEQ ID NO: 2934 - DNA, 60 bp, Homo sapiens
  source 1..60: mol_type = genomic DNA
gcacgagaggtgaaattccactagggaactcctagcactgaatagtttaaagacacagtg

SEQ ID NO: 2935 - DNA, 60 bp, Homo sapiens
  source 1..60: mol_type = genomic DNA
tcccaactgaaattgccataaatatcaaaatagtcacagtgaattccttagtattaaagt

SEQ ID NO: 2936 - DNA, 60 bp, Homo sapiens
  source 1..60: mol_type = genomic DNA
taagcactgagcatttttcagctaacaattcataactgcttaaatatgaagctttttata

SEQ ID NO: 2937 - DNA, 60 bp, Homo sapiens
  source 1..60: mol_type = genomic DNA
cacacacacccctacctctaaacacctctcttccactcttagcaatgctcctgtacccat

SEQ ID NO: 2938 - DNA, 60 bp, Homo sapiens
  source 1..60: mol_type = genomic DNA
gcacagatgcacacagccctgcttttatgagaattgagcttaaatagatgtgggtggagg

SEQ ID NO: 2939 - DNA, 60 bp, Homo sapiens
  source 1..60: mol_type = genomic DNA
gtactgttattactgtaagaaaacacatgcaagaatagatatttattgcctcaattataa

SEQ ID NO: 2940 - DNA, 60 bp, Homo sapiens
  source 1..60: mol_type = genomic DNA
tgtcccaagagttgttgctttagataaccatatgagcatatcttatcttagaatttgtcc

SEQ ID NO: 2941 - DNA, 60 bp, Homo sapiens
  source 1..60: mol_type = genomic DNA
ttctcttatagatataccctttatcagcaaggagactaatatggcatttcttagtatatt

SEQ ID NO: 2942 - DNA, 60 bp, Homo sapiens
  source 1..60: mol_type = genomic DNA
caatagaatagtctttgagccatgtccttgaatggccactagtttcttttcttgactgcc

SEQ ID NO: 2943 - DNA, 60 bp, Homo sapiens
  source 1..60: mol_type = genomic DNA
tttgcctttggcgatgatggctataactgtagcctactgaataactgaacttcccccaaa

SEQ ID NO: 2944 - DNA, 60 bp, Homo sapiens
  source 1..60: mol_type = genomic DNA
aaaggaattgctccggcattatttataaagagacgtgtcagggaactatgaattctccaa

SEQ ID NO: 2945 - DNA, 60 bp, Homo sapiens
  source 1..60: mol_type = genomic DNA
cccatttcactcagaatagtgcagggaaaactgagcaaaccacgagaccaagccaatgtc

SEQ ID NO: 2946 - DNA, 60 bp, Homo sapiens
  source 1..60: mol_type = genomic DNA
cccttagttatgcttcatcccaaaaggatgactgagtgtcccatcacaccccaggtgaca

SEQ ID NO: 2947 - DNA, 60 bp, Homo sapiens
  source 1..60: mol_type = genomic DNA
aacatagagacagtatttttaacgtactttgagcagctcaacgggaaaggaatgtggaat

SEQ ID NO: 2948 - DNA, 60 bp, Homo sapiens
  source 1..60: mol_type = genomic DNA
tcacagaccatccttcctacatgttcagtagctgcaactccaaatcaaaattaaagtctc

SEQ ID NO: 2949 - DNA, 60 bp, Homo sapiens
  source 1..60: mol_type = genomic DNA
atcctaaggaaaaaaaataacaagtcacaggcatggcagctataatccatgtttagaaaa

SEQ ID NO: 2950 - DNA, 60 bp, Homo sapiens
  source 1..60: mol_type = genomic DNA
gaactcactacatagatttagaaacttaagatattttatagcaagggattgtttttccta

SEQ ID NO: 2951 - DNA, 60 bp, Homo sapiens
  source 1..60: mol_type = genomic DNA
gacatacacacacactcactgagttgacatgacaataaaaaaagtattcagagtgcgtcc

SEQ ID NO: 2952 - DNA, 60 bp, Homo sapiens
  source 1..60: mol_type = genomic DNA
cgtctacaactggccaagcctttgcccctccggtgctccagggttatcagacgctgggcc

SEQ ID NO: 2953 - DNA, 60 bp, Homo sapiens
  source 1..60: mol_type = genomic DNA
aagataacggtgacttatttcttatcccatagctcagggatcagcttttgtaaacttgga

SEQ ID NO: 2954 - DNA, 60 bp, Homo sapiens
  source 1..60: mol_type = genomic DNA
gtgtgtacatgcatgttcatacctatactgtgttgagagttcacacccagggccctccct

SEQ ID NO: 2955 - DNA, 60 bp, Homo sapiens
  source 1..60: mol_type = genomic DNA
tcacactcacactcaagaatggaagataaaaagcaccaagagcaaaggggctgcctaaag

SEQ ID NO: 2956 - DNA, 60 bp, Homo sapiens
  source 1..60: mol_type = genomic DNA
ccttgagtctccttgcgatggagagggtcacgtggtgtctcactttggcattattcttgt

SEQ ID NO: 2957 - DNA, 60 bp, Homo sapiens
  source 1..60: mol_type = genomic DNA
ggcactttccatgtcttttggcagagagattgatatcctggtaaatggaatcaagtttgg

SEQ ID NO: 2958 - DNA, 60 bp, Homo sapiens
  source 1..60: mol_type = genomic DNA
gtccacactctaaaatgcctccactgacaacaacctctctaataatgcagcgtggagaag

SEQ ID NO: 2959 - DNA, 60 bp, Homo sapiens
  source 1..60: mol_type = genomic DNA
acttcccttttgctaaagtaggcggctgtcatcatggcatttcatgcctaaatgttggat

SEQ ID NO: 2960 - DNA, 60 bp, Homo sapiens
  source 1..60: mol_type = genomic DNA
tgcacacacacaataggttatcttcaggcaagaaaatttatttgcgaggtgagggggatg

SEQ ID NO: 2961 - DNA, 60 bp, Homo sapiens
  source 1..60: mol_type = genomic DNA
gaggagatatatttatcttctactactctgcttcactggttgaactcggactgatacatc

SEQ ID NO: 2962 - DNA, 60 bp, Homo sapiens
  source 1..60: mol_type = genomic DNA
ccctttaaaaagtatttactctcaattttataagaagttgacggaactgttgaaagaatg

SEQ ID NO: 2963 - DNA, 60 bp, Homo sapiens
  source 1..60: mol_type = genomic DNA
gcaccaaaggttcttgtccaccccagcctatggtttgctttccaatcattcattctattc

SEQ ID NO: 2964 - DNA, 60 bp, Homo sapiens
  source 1..60: mol_type = genomic DNA
caatccacaaaaacaaaactgatcttggtggttataacaaattcaatttgaagttctgta

SEQ ID NO: 2965 - DNA, 60 bp, Homo sapiens
  source 1..60: mol_type = genomic DNA
gcacacactcacccaagacacggataaacaagcatgctgcctggagctgtcacctctctc

SEQ ID NO: 2966 - DNA, 60 bp, Homo sapiens
  source 1..60: mol_type = genomic DNA
tacacacacctctgcttattaggagatggcttatggctggaaagttctcacaactaagtt

SEQ ID NO: 2967 - DNA, 60 bp, Homo sapiens
  source 1..60: mol_type = genomic DNA
tacatcaacaactgccatgactccatccagccttttgcaggaggagcccaacacattgat

SEQ ID NO: 2968 - DNA, 60 bp, Homo sapiens
  source 1..60: mol_type = genomic DNA
cccttaaatttacttgcattttaccttccagaattttgcattgataaaatctgaggaaac

SEQ ID NO: 2969 - DNA, 60 bp, Homo sapiens
  source 1..60: mol_type = genomic DNA
aacttaaaacactttgagaacttctcgttaatcttagataaaggacagaagatctattca

SEQ ID NO: 2970 - DNA, 60 bp, Homo sapiens
  source 1..60: mol_type = genomic DNA
tacacacacgtctacatttctgtatttgtctctgagcaatgctgctttctttttcactat

SEQ ID NO: 2971 - DNA, 60 bp, Homo sapiens
  source 1..60: mol_type = genomic DNA
cctcccagaccttctctcacacccacagggatgagcagggtgccattggcccgtatcatt

SEQ ID NO: 2972 - DNA, 60 bp, Homo sapiens
  source 1..60: mol_type = genomic DNA
ttgcatttgaacattatctgctgttttttccttaagcagttcaactgtacctagaacttg

SEQ ID NO: 2973 - DNA, 60 bp, Homo sapiens
  source 1..60: mol_type = genomic DNA
tctgatgttcagctagcatgctccactgcagtgtatctcttctgatcagtcttgcattca

SEQ ID NO: 2974 - DNA, 60 bp, Homo sapiens
  source 1..60: mol_type = genomic DNA
tgatggtttggctggcttggccactgctccaattgctggtatgggtctgagggtttgatt

SEQ ID NO: 2975 - DNA, 60 bp, Homo sapiens
  source 1..60: mol_type = genomic DNA
gcaagcaaatggaagcttactgctgtacagctcagcctgaattagaaggggcaaaaatgt

SEQ ID NO: 2976 - DNA, 60 bp, Homo sapiens
  source 1..60: mol_type = genomic DNA
cactttggaatatataatttcctttctaaagttgactggctatggactctgacccttctg

SEQ ID NO: 2977 - DNA, 60 bp, Homo sapiens
  source 1..60: mol_type = genomic DNA
tcttaaaacctgtttccttgcaaataaagctataatgcaccaagatgattaaggtccact

SEQ ID NO: 2978 - DNA, 60 bp, Homo sapiens
  source 1..60: mol_type = genomic DNA
tggtgaaatcacccagagagaccacaaatgggatcatgtctcaaaggctgtgggacagcg

SEQ ID NO: 2979 - DNA, 60 bp, Homo sapiens
  source 1..60: mol_type = genomic DNA
tcattcacttgtattactgaaataatttccaaaagacaatcaatattgccccaagacaat

SEQ ID NO: 2980 - DNA, 60 bp, Homo sapiens
  source 1..60: mol_type = genomic DNA
agcacaactgtgttataaagaataggcacttctctaagaggaacttgtcctgcttcatgc

SEQ ID NO: 2981 - DNA, 60 bp, Homo sapiens
  source 1..60: mol_type = genomic DNA
gtctgtgtggagacagtaaaaatgactttgcaacaagatatgggaggccagtatcttaga

SEQ ID NO: 2982 - DNA, 60 bp, Homo sapiens
  source 1..60: mol_type = genomic DNA
taatgtatgatggggatagtggataagaactttaactaaaactgcctggctttgtcactt

SEQ ID NO: 2983 - DNA, 60 bp, Homo sapiens
  source 1..60: mol_type = genomic DNA
ccgtactccgtgctgcccccaactctttatccacctgagaggctgcaggaatgcatctca

SEQ ID NO: 2984 - DNA, 60 bp, Homo sapiens
  source 1..60: mol_type = genomic DNA
gacgcctttctgaacatcccccaggttccaccattggaggcctggtgttggttcaagtca

SEQ ID NO: 2985 - DNA, 60 bp, Homo sapiens
  source 1..60: mol_type = genomic DNA
gttagcagaagggagacatgaagcctggggtggttgctttttgaagacttttgttttact

SEQ ID NO: 2986 - DNA, 60 bp, Homo sapiens
  source 1..60: mol_type = genomic DNA
tgcacagacacacttcaaaataaagccacctctggataacaatgtcatcattagataaca

SEQ ID NO: 2987 - DNA, 60 bp, Homo sapiens
  source 1..60: mol_type = genomic DNA
gagattgctcatgaaggcataagaaggcataagatttctttccctcagggtataaggatg

SEQ ID NO: 2988 - DNA, 60 bp, Homo sapiens
  source 1..60: mol_type = genomic DNA
aacacacagatagagagatagttttctaatttagaagaactttatccgatttgtgatata

SEQ ID NO: 2989 - DNA, 60 bp, Homo sapiens
  source 1..60: mol_type = genomic DNA
taattttgtaggctgtatatcatccttaaacaattcctggccccaaaagacactcggtgc

SEQ ID NO: 2990 - DNA, 60 bp, Homo sapiens
  source 1..60: mol_type = genomic DNA
atcactcacacatgtgtgcaattttctttcttcttctcaggaattaataggccccagtga

SEQ ID NO: 2991 - DNA, 60 bp, Homo sapiens
  source 1..60: mol_type = genomic DNA
gagacatgtgagttgatcaggccctgacaccgtgtacattcaaactgccccgaaagcaaa

SEQ ID NO: 2992 - DNA, 60 bp, Homo sapiens
  source 1..60: mol_type = genomic DNA
aacacaccagggagatcatccttaatgattgtttttctacatacttcctaagctaggaca

SEQ ID NO: 2993 - DNA, 60 bp, Homo sapiens
  source 1..60: mol_type = genomic DNA
tgcacacacgtattcttcatcatgtttttaaaaacttggctggttttggccaggcgcagt

SEQ ID NO: 2994 - DNA, 60 bp, Homo sapiens
  source 1..60: mol_type = genomic DNA
gaacacagaaaatgtatcattgttttttctatgtacaaacactgagaacaatcttttaat

SEQ ID NO: 2995 - DNA, 60 bp, Homo sapiens
  source 1..60: mol_type = genomic DNA
tacgtacacacagagtgctgagcaaaattaagccagctgtcaaaccatagttccacactg

SEQ ID NO: 2996 - DNA, 60 bp, Homo sapiens
  source 1..60: mol_type = genomic DNA
taaatgatgggcacagatgcaccaggcgtacacagtgtgccacacacattacagacacag

SEQ ID NO: 2997 - DNA, 60 bp, Homo sapiens
  source 1..60: mol_type = genomic DNA
gcatagtattgtggtaatggtagtgcagttttagaacctggggttctgctcttcctttgg

SEQ ID NO: 2998 - DNA, 60 bp, Homo sapiens
  source 1..60: mol_type = genomic DNA
aatgcctccacccgccatgcaggtgcttgcaaaaccctgagcatccactcttgttcccat

SEQ ID NO: 2999 - DNA, 60 bp, Homo sapiens
  source 1..60: mol_type = genomic DNA
aaactgaacttagatttttactgtctcccctgtaatgtccgatacttcagagaaagcaca

SEQ ID NO: 3000 - DNA, 60 bp, Homo sapiens
  source 1..60: mol_type = genomic DNA
gcacaagcaccactagccctgagccttctttggcaccctttctcccctttacatccatca

SEQ ID NO: 3001 - DNA, 60 bp, Homo sapiens
  source 1..60: mol_type = genomic DNA
gcaaatagtgagggacaggtgaagctgagccacggtgtctgggagtaacgtgagtagtgc

SEQ ID NO: 3002 - DNA, 60 bp, Homo sapiens
  source 1..60: mol_type = genomic DNA
ctgagcgaaaaagcctgacgtgaagtcacagaacaggtaggcaaacatgaacaaggaaat

SEQ ID NO: 3003 - DNA, 60 bp, Homo sapiens
  source 1..60: mol_type = genomic DNA
taccctaaaaccttattgaatctctagttatgtgtgtgtatgcgtaaaattatgcaacat

SEQ ID NO: 3004 - DNA, 60 bp, Homo sapiens
  source 1..60: mol_type = genomic DNA
cccgccaccgtctgtgctgcaactggatgggaaagacaagcgccggagcctgggtgagct

SEQ ID NO: 3005 - DNA, 60 bp, Homo sapiens
  source 1..60: mol_type = genomic DNA
cacccagacattctggcagcaccgccctttctcactatggtccccaagtgttctcagact

SEQ ID NO: 3006 - DNA, 60 bp, Homo sapiens
  source 1..60: mol_type = genomic DNA
gcgcatgcacacacatgatagaacatgtatacatgaactttgaaactcagatttctgaga

SEQ ID NO: 3007 - DNA, 60 bp, Homo sapiens
  source 1..60: mol_type = genomic DNA
cccttgttgaaggcccaagtaaatatttagcattatcaataaggataatcccattaaagt

SEQ ID NO: 3008 - DNA, 60 bp, Homo sapiens
  source 1..60: mol_type = genomic DNA
tcctgtatcccaataaagataggagacaacggacagaacccccaccacttgtccttggga

SEQ ID NO: 3009 - DNA, 60 bp, Homo sapiens
  source 1..60: mol_type = genomic DNA
ctccacagaacaagcagtagtattacaggcaccctcaagacttcactattaagtttaggt

SEQ ID NO: 3010 - DNA, 60 bp, Homo sapiens
  source 1..60: mol_type = genomic DNA
cttcaactaaccctcaaatccctttagccccacatttccatagccagtgagtcatcagac

SEQ ID NO: 3011 - DNA, 60 bp, Homo sapiens
  source 1..60: mol_type = genomic DNA
aattataagactggctgctctcctagtacgtattcactgtgtggtctttacaaatttgct

SEQ ID NO: 3012 - DNA, 60 bp, Homo sapiens
  source 1..60: mol_type = genomic DNA
catgtaagaaatacacccctgccacagcaggcaatttgcatcacatctgacttggtttgc

SEQ ID NO: 3013 - DNA, 60 bp, Homo sapiens
  source 1..60: mol_type = genomic DNA
gtacaccctaagtatctactacagtgattttgcatacaacagatgataattaatgctgaa

SEQ ID NO: 3014 - DNA, 60 bp, Homo sapiens
  source 1..60: mol_type = genomic DNA
cgtcctacactttaagctgctcctttggtatgactctatacttatggaaatgtagaaaca

SEQ ID NO: 3015 - DNA, 60 bp, Homo sapiens
  source 1..60: mol_type = genomic DNA
gtatgtgataatgatcttgcttaggagtaatattttctcagccacatgagtaagaacaat

SEQ ID NO: 3016 - DNA, 60 bp, Homo sapiens
  source 1..60: mol_type = genomic DNA
gttccacatatcacagcaaatttattaacatacacgaattattttttgtaattagactat

SEQ ID NO: 3017 - DNA, 60 bp, Homo sapiens
  source 1..60: mol_type = genomic DNA
tacacacttcacatgatacacaagaaatacaagacataaggttggctttgactaaaacag

SEQ ID NO: 3018 - DNA, 60 bp, Homo sapiens
  source 1..60: mol_type = genomic DNA
ttctcactatgacctctgctggaaaagtcctcatctgatatttctagaattaatctctgc

SEQ ID NO: 3019 - DNA, 60 bp, Homo sapiens
  source 1..60: mol_type = genomic DNA
gtaacaactattttattctaatccaccaaatctgtctataatttaaagtggtgtttacca

SEQ ID NO: 3020 - DNA, 60 bp, Homo sapiens
  source 1..60: mol_type = genomic DNA
tatacacacagtgaggccgctattggtaggcaaggaacaaaaattgggtaagatgggatc

SEQ ID NO: 3021 - DNA, 60 bp, Homo sapiens
  source 1..60: mol_type = genomic DNA
aaagtacactcttacaccattttgattgtggccttaaagttctactgaagacagcaggaa

SEQ ID NO: 3022 - DNA, 60 bp, Homo sapiens
  source 1..60: mol_type = genomic DNA
tacttgtgtgcaccacagacaatctgggtttttatcagggctgttctcacttcatccatg

SEQ ID NO: 3023 - DNA, 60 bp, Homo sapiens
  source 1..60: mol_type = genomic DNA
tcttagtgactacagggcaggaggaaatctttatatgaagataatataaacacatcggta

SEQ ID NO: 3024 - DNA, 60 bp, Homo sapiens
  source 1..60: mol_type = genomic DNA
actgtgggctctctctagtgctatgaattcttcagcgggctctgtccccactgtgcagtt

SEQ ID NO: 3025 - DNA, 60 bp, Homo sapiens
  source 1..60: mol_type = genomic DNA
actgtttggtatgatgaggaagaaaggaactcaactgttatgagtccaagttcccattct

SEQ ID NO: 3026 - DNA, 60 bp, Homo sapiens
  source 1..60: mol_type = genomic DNA
gagacaaaagtttgctgccacttagaatctttagataagctagttctaggctccaaagat

SEQ ID NO: 3027 - DNA, 60 bp, Homo sapiens
  source 1..60: mol_type = genomic DNA
ggcggctgctctacatgcacacgcctgggagcagctgcccaccccgctaccctgcgccac

SEQ ID NO: 3028 - DNA, 60 bp, Homo sapiens
  source 1..60: mol_type = genomic DNA
ggtggtttcctatcacagccgttgggcaatgtgcaaggattccagggatcaggaatgcag

SEQ ID NO: 3029 - DNA, 60 bp, Homo sapiens
  source 1..60: mol_type = genomic DNA
tgaatacaagcctttgttcccactcatataggtcaggtcattcaattcagacagtataag

SEQ ID NO: 3030 - DNA, 60 bp, Homo sapiens
  source 1..60: mol_type = genomic DNA
tgaatgcaacagtacttaaacttgaaaactttgggagagttgttattagggatgaaaatt

SEQ ID NO: 3031 - DNA, 60 bp, Homo sapiens
  source 1..60: mol_type = genomic DNA
tgcgcgagatctgtgggtgtacataaagattttccaagtaatgtacggacaagaagagct

SEQ ID NO: 3032 - DNA, 60 bp, Homo sapiens
  source 1..60: mol_type = genomic DNA
tacacaccctactcttacctatagtgatagtctgcataggaaagatctcaactcttatca

SEQ ID NO: 3033 - DNA, 60 bp, Homo sapiens
  source 1..60: mol_type = genomic DNA
cgtgacataaaaaagcatgttgctcacgcctctatttattactgttactttcagtattta

SEQ ID NO: 3034 - DNA, 60 bp, Homo sapiens
  source 1..60: mol_type = genomic DNA
tcctgtttgatttatttaagaaggttgggataaaagaattgttcagagcttaagccctca

SEQ ID NO: 3035 - DNA, 60 bp, Homo sapiens
  source 1..60: mol_type = genomic DNA
cacagagtacagcacatttatagaaaagtattttactaaggccagaaccactcatttaaa

SEQ ID NO: 3036 - DNA, 60 bp, Homo sapiens
  source 1..60: mol_type = genomic DNA
tatttgaaagtatatgatagatgaaatgagttcactgccccatcaaccatgatcggcagg

SEQ ID NO: 3037 - DNA, 60 bp, Homo sapiens
  source 1..60: mol_type = genomic DNA
atacaggtatttctacctgtattggccattaagaattttgtgatgagcaagtgggactga

SEQ ID NO: 3038 - DNA, 60 bp, Homo sapiens
  source 1..60: mol_type = genomic DNA
ctttgcagccatggtgaccctgctaatcttcaagttcagcacttgtcaggtgctgacaca

SEQ ID NO: 3039 - DNA, 60 bp, Homo sapiens
  source 1..60: mol_type = genomic DNA
atcacacacacgaggaaattcaagactccctttcctcctgatacttccaggtacaatagg

SEQ ID NO: 3040 - DNA, 60 bp, Homo sapiens
  source 1..60: mol_type = genomic DNA
gtatacaagtccccctctaactggaaatggccccaatagccatctctctggttatccatc

SEQ ID NO: 3041 - DNA, 60 bp, Homo sapiens
  source 1..60: mol_type = genomic DNA
tgcacagcccagttaaagactcaccggcacgtgtgacagcagactctcttccgggatgcc

SEQ ID NO: 3042 - DNA, 60 bp, Homo sapiens
  source 1..60: mol_type = genomic DNA
aatacaacctcgttcttccatgaagggcagcatcatgggtctctaacctgatcctccttc

SEQ ID NO: 3043 - DNA, 60 bp, Homo sapiens
  source 1..60: mol_type = genomic DNA
gaacgcacacacagagaaccaagtcctggttgccagggcaaccacctggcgcttagcctc

SEQ ID NO: 3044 - DNA, 60 bp, Homo sapiens
  source 1..60: mol_type = genomic DNA
gtgtacgtatgtaggtcagtgggttgcagttggtttgtcaccttaagatctgtaaacaag

SEQ ID NO: 3045 - DNA, 60 bp, Homo sapiens
  source 1..60: mol_type = genomic DNA
tacttttttactttccagtttcccctgttacttggtgtgctgcttgaaaccagacttgcc

SEQ ID NO: 3046 - DNA, 60 bp, Homo sapiens
  source 1..60: mol_type = genomic DNA
cattagttctgagctaatcacagaagtaaacagtatgttattctagtgcatcctgggatg

SEQ ID NO: 3047 - DNA, 60 bp, Homo sapiens
  source 1..60: mol_type = genomic DNA
ctctaagctgctggccgaagatgtcaccaaggccaaagacacagtattatgaaggtttgg

SEQ ID NO: 3048 - DNA, 60 bp, Homo sapiens
  source 1..60: mol_type = genomic DNA
gagggaccacgtgtgcacgcatgaccgtgtgggtggcggcgtttgctgtgaaccacgctc

SEQ ID NO: 3049 - DNA, 60 bp, Homo sapiens
  source 1..60: mol_type = genomic DNA
aacacacagagagagtaaagagactaatattttatattgttaacaagctttgttttatac

SEQ ID NO: 3050 - DNA, 60 bp, Homo sapiens
  source 1..60: mol_type = genomic DNA
tcctttcaaccttcattcatcagggaacttaccttaatgtcagacttgactatttctatc

SEQ ID NO: 3051 - DNA, 60 bp, Homo sapiens
  source 1..60: mol_type = genomic DNA
ccctcaaacaaaacacccactactctttccatttcctgtcaacaaggagttcaagttcaa

SEQ ID NO: 3052 - DNA, 60 bp, Homo sapiens
  source 1..60: mol_type = genomic DNA
accataattatcgttttaccatcagtaatgttcagctagctagccctgcacctactagca

SEQ ID NO: 3053 - DNA, 60 bp, Homo sapiens
  source 1..60: mol_type = genomic DNA
atgttgctgctattgtttattcttctggctcctctcttacctgccccctattaaaaaaaa

SEQ ID NO: 3054 - DNA, 60 bp, Homo sapiens
  source 1..60: mol_type = genomic DNA
aaaaagtaaaacagtagctcatactcaagggcagatgtggttacaagggctttaaataca

SEQ ID NO: 3055 - DNA, 60 bp, Homo sapiens
  source 1..60: mol_type = genomic DNA
tacacagtacaggcacacgcacttttaagaagccaggactgccatccatgtgtggtcatc

SEQ ID NO: 3056 - DNA, 60 bp, Homo sapiens
  source 1..60: mol_type = genomic DNA
gcttccctcacatagatcaagtttctttgatctacctatcacttgcatacctcagaacac

SEQ ID NO: 3057 - DNA, 60 bp, Homo sapiens
  source 1..60: mol_type = genomic DNA
tcacacactcctgttgtacagcttcagaggtgggtatgacttgatcacaaataaagggag

SEQ ID NO: 3058 - DNA, 60 bp, Homo sapiens
  source 1..60: mol_type = genomic DNA
gcacccctatcttagataattttgggctgtcagtcaaaacaaagaaaatagcgtctccaa

SEQ ID NO: 3059 - DNA, 60 bp, Homo sapiens
  source 1..60: mol_type = genomic DNA
atctttattctattctctaaactatacctagggagaatgttctgtttatagataacggtt

SEQ ID NO: 3060 - DNA, 60 bp, Homo sapiens
  source 1..60: mol_type = genomic DNA
gaaaccagcttgaaataaccattgtacttgatgatatagaagaatgtcattttggacagt

SEQ ID NO: 3061 - DNA, 60 bp, Homo sapiens
  source 1..60: mol_type = genomic DNA
ccccgttatgaaagtgattcatcttctcatgctgaattgataatgagtaacatgaacaat

SEQ ID NO: 3062 - DNA, 60 bp, Homo sapiens
  source 1..60: mol_type = genomic DNA
tcaaaactccacgcataatcttaaggtttcatccagaaattgagggctgcaggcacttcc

SEQ ID NO: 3063 - DNA, 60 bp, Homo sapiens
  source 1..60: mol_type = genomic DNA
cctctctcccaaagcccccttctttttgcctgtcaagtttcattccaaaaatacacatgt

SEQ ID NO: 3064 - DNA, 60 bp, Homo sapiens
  source 1..60: mol_type = genomic DNA
tatacaaaccacacccaaggctaactcagttgcctctttttagtgctgaatctttgtact

SEQ ID NO: 3065 - DNA, 60 bp, Homo sapiens
  source 1..60: mol_type = genomic DNA
ctgagatttatctagtccttggaagtttccatgcaagttggggaagcagctggaaggtga

SEQ ID NO: 3066 - DNA, 60 bp, Homo sapiens
  source 1..60: mol_type = genomic DNA
gcaagtgcctatgtggcaaatgactagagtggagtgagctgggaatgggacttgcaggga

SEQ ID NO: 3067 - DNA, 60 bp, Homo sapiens
  source 1..60: mol_type = genomic DNA
ccctccaaacaaatgccacaaccaggcctgccccacacaaaggaacccatcatgcgctga

SEQ ID NO: 3068 - DNA, 60 bp, Homo sapiens
  source 1..60: mol_type = genomic DNA
gagtgctggaatcttgaatcaaacaagtattggaagtctgttttctaaccagaccccatt

SEQ ID NO: 3069 - DNA, 60 bp, Homo sapiens
  source 1..60: mol_type = genomic DNA
gactccacaaccctctgcaatccaaactatacagaactgacataaaattgagacaaaggt

SEQ ID NO: 3070 - DNA, 60 bp, Homo sapiens
  source 1..60: mol_type = genomic DNA
cccctctagctctctgttctataatgtaaataactggaatagatgtttagtctaaaatgt

SEQ ID NO: 3071 - DNA, 60 bp, Homo sapiens
  source 1..60: mol_type = genomic DNA
aatatatttagaacgtattaagaactaaaattagtttaaccaaccatgtattttgtggac

SEQ ID NO: 3072 - DNA, 60 bp, Homo sapiens
  source 1..60: mol_type = genomic DNA
ccacacacaccctgcccgtctctttctttccactcccatattaaaatcataccacagtca

SEQ ID NO: 3073 - DNA, 60 bp, Homo sapiens
  source 1..60: mol_type = genomic DNA
agggcttcggtgtggaaacagagcacacagaaggaaaacagcagaatagttagaaatgtc

SEQ ID NO: 3074 - DNA, 60 bp, Homo sapiens
  source 1..60: mol_type = genomic DNA
cctctgttcatttgtgtctcttcttcactgtgcaggtccatgaaatctcctggggactgt

SEQ ID NO: 3075 - DNA, 60 bp, Homo sapiens
  source 1..60: mol_type = genomic DNA
gcttcatccaatgggcagaaaaatgttcccaccattctaggctgtcccctgggaggaaag

SEQ ID NO: 3076 - DNA, 60 bp, Homo sapiens
  source 1..60: mol_type = genomic DNA
gcacatacacacacttctccattcttgaacatatgagacattgttaccattgtccattca

SEQ ID NO: 3077 - DNA, 60 bp, Homo sapiens
  source 1..60: mol_type = genomic DNA
aaaatcttgccctcctagaaattcacctctcaaaacaataccagccaagtagaagaggaa

SEQ ID NO: 3078 - DNA, 60 bp, Homo sapiens
  source 1..60: mol_type = genomic DNA
gctgcacctctcaaaactctagccataccacacttcaatgccagttccaaaaaggcacag

SEQ ID NO: 3079 - DNA, 60 bp, Homo sapiens
  source 1..60: mol_type = genomic DNA
cggcgtactggaacctctctcgcgatcccgcacccagcttgaattcagcaagaatcgaaa

SEQ ID NO: 3080 - DNA, 60 bp, Homo sapiens
  source 1..60: mol_type = genomic DNA
gagcccgtgggaagacaagaccgccggcgacagcccgccgcgctgcccgggcgctcaagc

SEQ ID NO: 3081 - DNA, 60 bp, Homo sapiens
  source 1..60: mol_type = genomic DNA
agccatgcctaagttttcttccttgcatcagacagtgcaagaggatttgcttgggtaagc

SEQ ID NO: 3082 - DNA, 60 bp, Homo sapiens
  source 1..60: mol_type = genomic DNA
ggagtattgggctaatagatgaactatcagaaacccgattaaatcttagcctaatactgc

SEQ ID NO: 3083 - DNA, 60 bp, Homo sapiens
  source 1..60: mol_type = genomic DNA
atttttaaagtactgctgaatgatcacctctaggatgatcctaaacatatgctgacttat

SEQ ID NO: 3084 - DNA, 60 bp, Homo sapiens
  source 1..60: mol_type = genomic DNA
ccatatgatagcaagcctctttattaaatagaactatgtcttacacatcagtaaggaaaa

SEQ ID NO: 3085 - DNA, 60 bp, Homo sapiens
  source 1..60: mol_type = genomic DNA
tgcactcaccctcagtcatttcatgccagatgctctgccaaggcacgttagccagaggag

SEQ ID NO: 3086 - DNA, 60 bp, Homo sapiens
  source 1..60: mol_type = genomic DNA
caacttgtgcatcaggtagtatgcagtaaggaaacatttggcagagtggatggctggaga

SEQ ID NO: 3087 - DNA, 60 bp, Homo sapiens
  source 1..60: mol_type = genomic DNA
catttatggcctagagcagtttatccatttcccatactttaaaaccgtggttttctgaag

SEQ ID NO: 3088 - DNA, 60 bp, Homo sapiens
  source 1..60: mol_type = genomic DNA
tcctcctaatgcactgcaggataatccctaagaatgtctaagtaccttttagcatgatcc

SEQ ID NO: 3089 - DNA, 60 bp, Homo sapiens
  source 1..60: mol_type = genomic DNA
ctgtgcgtgttaagtgattatagattacagagcttgctgtgcgaagcttactatttttat

SEQ ID NO: 3090 - DNA, 60 bp, Homo sapiens
  source 1..60: mol_type = genomic DNA
gatgcagggtggcaggatcagagaaccattcagtgagtaatcaccttaaaatggtaacta

SEQ ID NO: 3091 - DNA, 60 bp, Homo sapiens
  source 1..60: mol_type = genomic DNA
tcacagatattccccagcattaaactttcctaaagactcaaaaatacagaaagcacaagc

SEQ ID NO: 3092 - DNA, 60 bp, Homo sapiens
  source 1..60: mol_type = genomic DNA
gcatcctacaagaccatgaacatgaagtaggacattggtatgatctgaacgtgtccacca

SEQ ID NO: 3093 - DNA, 60 bp, Homo sapiens
  source 1..60: mol_type = genomic DNA
gagccacggaggttttagtgtttaactaatgtaacatttccataaattatttccataaat

SEQ ID NO: 3094 - DNA, 60 bp, Homo sapiens
  source 1..60: mol_type = genomic DNA
gacacacacacaaagtccagcacaaagtatcctaacactttttttggatggtactagaat

SEQ ID NO: 3095 - DNA, 60 bp, Homo sapiens
  source 1..60: mol_type = genomic DNA
tatggaagagcagcctaggagagaaaaacaatcacttggaatctgtggataaaaattata

SEQ ID NO: 3096 - DNA, 60 bp, Homo sapiens
  source 1..60: mol_type = genomic DNA
tgtggcttattgatgagattggcatgtgaacagcatatccatgctgagaacatgggtaag

SEQ ID NO: 3097 - DNA, 60 bp, Homo sapiens
  source 1..60: mol_type = genomic DNA
taccagccagagaccagagaccccaatcagtacttttaaaaggaataaaaattgctcaat

SEQ ID NO: 3098 - DNA, 60 bp, Homo sapiens
  source 1..60: mol_type = genomic DNA
aatacacatgaaacacctgctaacatgagcaaactagaaaaagaatgaccagatcaacaa

SEQ ID NO: 3099 - DNA, 60 bp, Homo sapiens
  source 1..60: mol_type = genomic DNA
gttataactagatcataaggtaaaattctgcttctaggagagcataaactgagtctttcc

SEQ ID NO: 3100 - DNA, 60 bp, Homo sapiens
  source 1..60: mol_type = genomic DNA
gcacaccagctgagaagacctgccctagaaaatccatggattattgatttttggggtgct

SEQ ID NO: 3101 - DNA, 60 bp, Homo sapiens
  source 1..60: mol_type = genomic DNA
aaacacaggtatgatctagagactgagcatctgaaagagccaaaataatccaacaccaga

SEQ ID NO: 3102 - DNA, 60 bp, Homo sapiens
  source 1..60: mol_type = genomic DNA
ttctttcatcactggggaagaaggccccagtaacaggcccctgtgtcccttcctgcctct

SEQ ID NO: 3103 - DNA, 60 bp, Homo sapiens
  source 1..60: mol_type = genomic DNA
gagaataaaagctcattcttcatcctagggccatggatttaaagaacccacaatcctgat

SEQ ID NO: 3104 - DNA, 60 bp, Homo sapiens
  source 1..60: mol_type = genomic DNA
gtcctcatgcctggagtcctctgtaagtctttcccctatagaggatagggccaaaaatga

SEQ ID NO: 3105 - DNA, 60 bp, Homo sapiens
  source 1..60: mol_type = genomic DNA
tccagtatcactgatcaacctttttcaagaactctgattactttcatctcaaggtccaga

SEQ ID NO: 3106 - DNA, 60 bp, Homo sapiens
  source 1..60: mol_type = genomic DNA
aagatgggaagtgagctaaaaacagtatctctcgttctttattttactgtctctcttcta

SEQ ID NO: 3107 - DNA, 60 bp, Homo sapiens
  source 1..60: mol_type = genomic DNA
tgacagacagaaattatatcttaatttatttcatacagataacattagggtgataaagat

SEQ ID NO: 3108 - DNA, 60 bp, Homo sapiens
  source 1..60: mol_type = genomic DNA
gcacacagatgcacacatgccagtaagttttgctcataacagccgcccttaactatctgt

SEQ ID NO: 3109 - DNA, 60 bp, Homo sapiens
  source 1..60: mol_type = genomic DNA
tgcacacacgcacgcacaagacagagggctatgtaaggagaaaaacctaactggctcaac

SEQ ID NO: 3110 - DNA, 60 bp, Homo sapiens
  source 1..60: mol_type = genomic DNA
gcaggcattcagcctactgaccccgctcgtggctgtgtgctatagacacacagaaataca

SEQ ID NO: 3111 - DNA, 60 bp, Homo sapiens
  source 1..60: mol_type = genomic DNA
gcacacacacacggatattagaaagacagaaagaatgtgctcaattgagaaacaggaatc

SEQ ID NO: 3112 - DNA, 60 bp, Homo sapiens
  source 1..60: mol_type = genomic DNA
atgatataaaagttataaatgcactatagcttagcatatgattgtaaacctctgaccttt

SEQ ID NO: 3113 - DNA, 60 bp, Homo sapiens
  source 1..60: mol_type = genomic DNA
ccctacacatccttacccattatagtaagtccccgttttaattattcaaaggtagagaat

SEQ ID NO: 3114 - DNA, 60 bp, Homo sapiens
  source 1..60: mol_type = genomic DNA
aaatgtctcaccaagcacctggctcatatccaaggtgtagggagacctgttactgagaaa

SEQ ID NO: 3115 - DNA, 60 bp, Homo sapiens
  source 1..60: mol_type = genomic DNA
cacagaggagtggacaaagggctatcttgagagtcctcaagactggtggaaattctacct

SEQ ID NO: 3116 - DNA, 60 bp, Homo sapiens
  source 1..60: mol_type = genomic DNA
cttgtaatcagggtccacagattttattggtctttgtagagaacctactcatttgagact

SEQ ID NO: 3117 - DNA, 60 bp, Homo sapiens
  source 1..60: mol_type = genomic DNA
ccagtcactgcaaagaacatttgcccaaaggagaagtcagacaaccattctccaaaaata

SEQ ID NO: 3118 - DNA, 60 bp, Homo sapiens
  source 1..60: mol_type = genomic DNA
gcctgtttctaatcacatggtaggcttcagtgcgtatcagtgcatctctctctaactgca

SEQ ID NO: 3119 - DNA, 60 bp, Homo sapiens
  source 1..60: mol_type = genomic DNA
cctgaaacaagatatcatgcgcaagagtcagtagaaacaatagttgttcctgacaatttc

SEQ ID NO: 3120 - DNA, 60 bp, Homo sapiens
  source 1..60: mol_type = genomic DNA
aggcaagtgaacaggcatgaggaaggcagtctgcagctggctcggaaatttcactgattt

SEQ ID NO: 3121 - DNA, 60 bp, Homo sapiens
  source 1..60: mol_type = genomic DNA
tgcacacacaggggagcagatacctgcagagaagagccaaccaggtcctgattagtggca

SEQ ID NO: 3122 - DNA, 60 bp, Homo sapiens
  source 1..60: mol_type = genomic DNA
tccgtatcctttcccaaatcagactgtcactcaccaagaacctacgctacagaaactccc

SEQ ID NO: 3123 - DNA, 60 bp, Homo sapiens
  source 1..60: mol_type = genomic DNA
tacatgactagactagaataagatttggttgattttctgctaatatcaggggtttatata

SEQ ID NO: 3124 - DNA, 60 bp, Homo sapiens
  source 1..60: mol_type = genomic DNA
tagttgggggagcttcgattcttttcaaaggactttgctggtgagacttgaaagtgccat

SEQ ID NO: 3125 - DNA, 60 bp, Homo sapiens
  source 1..60: mol_type = genomic DNA
tcactcatacagtcaatgacaccctccaaaataatgtttctgaattctctacagaacaag

SEQ ID NO: 3126 - DNA, 60 bp, Homo sapiens
  source 1..60: mol_type = genomic DNA
gcacacatctgcacaccccacactctcctgtcccacaggtcggccttatatagcctacta

SEQ ID NO: 3127 - DNA, 60 bp, Homo sapiens
  source 1..60: mol_type = genomic DNA
gatgctcacttcctcccatcatcacatcatcctctctaaatggttgttttcattttgtta

SEQ ID NO: 3128 - DNA, 60 bp, Homo sapiens
  source 1..60: mol_type = genomic DNA
gacacactccccccaaaacagagtaaggcagccgtgactaagcaatagcaacgtgtttga

SEQ ID NO: 3129 - DNA, 60 bp, Homo sapiens
  source 1..60: mol_type = genomic DNA
ccctccccttcacagtttttatattttcagagaaatctatgcatgatcttctgtcatgca

SEQ ID NO: 3130 - DNA, 60 bp, Homo sapiens
  source 1..60: mol_type = genomic DNA
tacacaccccttaccaaattcctgaatgaatcttgacttttcttctgagagagacctcct

SEQ ID NO: 3131 - DNA, 60 bp, Homo sapiens
  source 1..60: mol_type = genomic DNA
ccacacagataataaagggccacggactcctgaccaaccctcctcgcaacccataattag

SEQ ID NO: 3132 - DNA, 60 bp, Homo sapiens
  source 1..60: mol_type = genomic DNA
ttaatcggtcatcttgttgaacttcctacataacatctttgggtcctttttcagtgtata

SEQ ID NO: 3133 - DNA, 60 bp, Homo sapiens
  source 1..60: mol_type = genomic DNA
tacacacaatgtgtggcatgaggccctgaggtccatttgggatagcaaaggatggccaga

SEQ ID NO: 3134 - DNA, 60 bp, Homo sapiens
  source 1..60: mol_type = genomic DNA
acaacatatagatgaactgcaccgacagacagtaccaatgcacacggttgccaaaaaaaa

SEQ ID NO: 3135 - DNA, 60 bp, Homo sapiens
  source 1..60: mol_type = genomic DNA
tctatgaagaaattttccaacctgaattttgcccactgatgaatagaattggcagcccac

SEQ ID NO: 3136 - DNA, 60 bp, Homo sapiens
  source 1..60: mol_type = genomic DNA
aggaatgtctcttctttggctccttccgaggggcttgtactgagtatctagaaccacccg

SEQ ID NO: 3137 - DNA, 60 bp, Homo sapiens
  source 1..60: mol_type = genomic DNA
tacacacacaaagggaagaaagcagttagaaaggagttcaatttcttctaaagaatagct

SEQ ID NO: 3138 - DNA, 60 bp, Homo sapiens
  source 1..60: mol_type = genomic DNA
aacacactcacgactccacttccctacatgtagtcctacataatggaaaaactgttgatt

SEQ ID NO: 3139 - DNA, 60 bp, Homo sapiens
  source 1..60: mol_type = genomic DNA
aatccaaagatgcatgaagctgaaaagtatgagatggtgttagcaatttaagaaaggatt

SEQ ID NO: 3140 - DNA, 60 bp, Homo sapiens
  source 1..60: mol_type = genomic DNA
gacatgcatctggatcttgtgggagagccagctcatgaagatagtatgaatgattaaggt

SEQ ID NO: 3141 - DNA, 60 bp, Homo sapiens
  source 1..60: mol_type = genomic DNA
aacacacagggttttgtggtcaagttaagttttggaaattcttacttaaacataaacagg

SEQ ID NO: 3142 - DNA, 60 bp, Homo sapiens
  source 1..60: mol_type = genomic DNA
gcatgcacacacatttgtaggtagtcacacttacaaagagcacacatgctgtcatcttta

SEQ ID NO: 3143 - DNA, 60 bp, Homo sapiens
  source 1..60: mol_type = genomic DNA
gctcacaccccaagtggagtaggacaggctttgctggctgaaagagtgtaacgtgttctg

SEQ ID NO: 3144 - DNA, 60 bp, Homo sapiens
  source 1..60: mol_type = genomic DNA
ggtaaagactatatcaaatgtgaatttacgtatgcctctgtatgtttgccaggatgaaga

SEQ ID NO: 3145 - DNA, 60 bp, Homo sapiens
  source 1..60: mol_type = genomic DNA
cacatacacattttgggggagtaaacccttatgaaagcttataaattaaactctgccagt

SEQ ID NO: 3146 - DNA, 60 bp, Homo sapiens
  source 1..60: mol_type = genomic DNA
cccagtttcggggtgtagctgccactatcatgccaaaaagaaaaataaggctgcttaaga

SEQ ID NO: 3147 - DNA, 60 bp, Homo sapiens
  source 1..60: mol_type = genomic DNA
ctcttagggaaatgagagcagtctcttaaccttacaggcaactctactagtctcaacatg

SEQ ID NO: 3148 - DNA, 60 bp, Homo sapiens
  source 1..60: mol_type = genomic DNA
tcctctctctctcttcttgatggcctctgacacctcttcagaatgcagggctctgcagta

SEQ ID NO: 3149 - DNA, 60 bp, Homo sapiens
  source 1..60: mol_type = genomic DNA
gccccccaaaaccacaaggtctagagaggtgtctgggacatgtgctttgaactgccagcc

SEQ ID NO: 3150 - DNA, 60 bp, Homo sapiens
  source 1..60: mol_type = genomic DNA
tcgatcatctccaccaaaaccaatattttgacttatggtgcctttgctgctgtcagctca

SEQ ID NO: 3151 - DNA, 16 bp, Homo sapiens
  source 1..16: mol_type = genomic DNA
cacacacacacacaca

SEQ ID NO: 3152 - DNA, 26 bp, Homo sapiens
  source 1..26: mol_type = genomic DNA
acacacacacacacacacacacacac

SEQ ID NO: 3153 - DNA, 25 bp, Homo sapiens
  source 1..25: mol_type = genomic DNA
acacacacacacacacacacacaca

SEQ ID NO: 3154 - DNA, 55 bp, Homo sapiens
  source 1..55: mol_type = genomic DNA
acacacacacacacacacacacacacacacacacacacacacacacacacacaca

SEQ ID NO: 3155 - DNA, 12 bp, Homo sapiens
  source 1..12: mol_type = genomic DNA
cacacacacaca

SEQ ID NO: 3156 - DNA, 27 bp, Homo sapiens
  source 1..27: mol_type = genomic DNA
acacacacacacacacacacacacaca

SEQ ID NO: 3157 - DNA, 35 bp, Homo sapiens
  source 1..35: mol_type = genomic DNA
cacacacacacacacacacacacacacacacacac

SEQ ID NO: 3158 - DNA, 12 bp, Homo sapiens
  source 1..12: mol_type = genomic DNA
cacacacacaca

SEQ ID NO: 3159 - DNA, 43 bp, Homo sapiens
  source 1..43: mol_type = genomic DNA
acacacacacacacacacacacacacacacacacacacacaca

SEQ ID NO: 3160 - DNA, 29 bp, Homo sapiens
  source 1..29: mol_type = genomic DNA
cacacacacacacacacacacacacacac

SEQ ID NO: 3161 - DNA, 12 bp, Homo sapiens
  source 1..12: mol_type = genomic DNA
acacacacacac

SEQ ID NO: 3162 - DNA, 12 bp, Homo sapiens
  source 1..12: mol_type = genomic DNA
cacacacacaca

SEQ ID NO: 3163 - DNA, 41 bp, Homo sapiens
  source 1..41: mol_type = genomic DNA
acacacacacacacacacacacacacacacacacacacaca

SEQ ID NO: 3164 - DNA, 43 bp, Homo sapiens
  source 1..43: mol_type = genomic DNA
cacacacacacacacacacacacacacacacacacacacacac

SEQ ID NO: 3165 - DNA, 44 bp, Homo sapiens
  source 1..44: mol_type = genomic DNA
acacacacacacacacacacacacacacacacacacacacacac

SEQ ID NO: 3166 - DNA, 14 bp, Homo sapiens
  source 1..14: mol_type = genomic DNA
acacacacacacac

SEQ ID NO: 3167 - DNA, 12 bp, Homo sapiens
  source 1..12: mol_type = genomic DNA
cacacacacaca

SEQ ID NO: 3168 - DNA, 25 bp, Homo sapiens
  source 1..25: mol_type = genomic DNA
cacacacacacacacacacacacac

SEQ ID NO: 3169 - DNA, 12 bp, Homo sapiens
  source 1..12: mol_type = genomic DNA
acacacacacac

SEQ ID NO: 3170 - DNA, 41 bp, Homo sapiens
  source 1..41: mol_type = genomic DNA
cacacacacacacacacacacacacacacacacacacacac

SEQ ID NO: 3171 - DNA, 14 bp, Homo sapiens
  source 1..14: mol_type = genomic DNA
acacacacacacac

SEQ ID NO: 3172 - DNA, 36 bp, Homo sapiens
  source 1..36: mol_type = genomic DNA
acacacacacacacacacacacacacacacacacac

SEQ ID NO: 3173 - DNA, 20 bp, Homo sapiens
  source 1..20: mol_type = genomic DNA
acacacacacacacacacac

SEQ ID NO: 3174 - DNA, 23 bp, Homo sapiens
  source 1..23: mol_type = genomic DNA
acacacacacacacacacacaca

SEQ ID NO: 3175 - DNA, 37 bp, Homo sapiens
  source 1..37: mol_type = genomic DNA
cacacacacacacacacacacacacacacacacacac

SEQ ID NO: 3176 - DNA, 13 bp, Homo sapiens
  source 1..13: mol_type = genomic DNA
acacacacacaca

SEQ ID NO: 3177 - DNA, 35 bp, Homo sapiens; identical to SEQ ID NO: 3157
  source 1..35: mol_type = genomic DNA

SEQ ID NO: 3178 - DNA, 37 bp, Homo sapiens; identical to SEQ ID NO: 3175
  source 1..37: mol_type = genomic DNA

SEQ ID NO: 3179 - DNA, 37 bp, Homo sapiens
  source 1..37: mol_type = genomic DNA
acacacacacacacacacacacacacacacacacaca

SEQ ID NO: 3180 - DNA, 12 bp, Homo sapiens
  source 1..12: mol_type = genomic DNA
acacacacacac

SEQ ID NO: 3181 - DNA, 31 bp, Homo sapiens
  source 1..31: mol_type = genomic DNA
acacacacacacacacacacacacacacaca

SEQ ID NO: 3182 - DNA, 23 bp, Homo sapiens
  source 1..23: mol_type = genomic DNA
acacacacacacacacacacaca

SEQ ID NO: 3183 - DNA, 41 bp, Homo sapiens; identical to SEQ ID NO: 3170
  source 1..41: mol_type = genomic DNA

SEQ ID NO: 3184 - DNA, 13 bp, Homo sapiens
  source 1..13: mol_type = genomic DNA
acacacacacaca

SEQ ID NO: 3185 - DNA, 50 bp, Homo sapiens
  source 1..50: mol_type = genomic DNA
acacacacacacacacacacacacacacacacacacacacacacacacac

SEQ ID NO: 3186 - DNA, 22 bp, Homo sapiens
  source 1..22: mol_type = genomic DNA
acacacacacacacacacacac

SEQ ID NO: 3187 - DNA, 51 bp, Homo sapiens
  source 1..51: mol_type = genomic DNA
acacacacacacacacacacacacacacacacacacacacacacacacaca

SEQ ID NO: 3188 - DNA, 12 bp, Homo sapiens
  source 1..12: mol_type = genomic DNA
cacacacacaca

SEQ ID NO: 3189 - DNA, 14 bp, Homo sapiens
  source 1..14: mol_type = genomic DNA
acacacacacacac

SEQ ID NO: 3190 - DNA, 29 bp, Homo sapiens
  source 1..29: mol_type = genomic DNA
cacacacacacacacacacacacacacac

SEQ ID NO: 3191 - DNA, 15 bp, Homo sapiens
  source 1..15: mol_type = genomic DNA
acacacacacacaca

SEQ ID NO: 3192 - DNA, 36 bp, Homo sapiens; identical to SEQ ID NO: 3172
  source 1..36: mol_type = genomic DNA

SEQ ID NO: 3193 - DNA, 48 bp, Homo sapiens
  source 1..48: mol_type = genomic DNA
acacacacacacacacacacacacacacacacacacacacacacacac

SEQ ID NO: 3194 - DNA, 50 bp, Homo sapiens; identical to SEQ ID NO: 3185
  source 1..50: mol_type = genomic DNA

SEQ ID NO: 3195 - DNA, 42 bp, Homo sapiens
  source 1..42: mol_type = genomic DNA
acacacacacacacacacacacacacacacacacacacacac

SEQ ID NO: 3196 - DNA, 47 bp, Homo sapiens
  source 1..47: mol_type = genomic DNA
cacacacacacacacacacacacacacacacacacacacacacacac

SEQ ID NO: 3197 - DNA, 13 bp, Homo sapiens
  source 1..13: mol_type = genomic DNA
acacacacacaca

SEQ ID NO: 3198 - DNA, 12 bp, Homo sapiens
  source 1..12: mol_type = genomic DNA
acacacacacac

SEQ ID NO: 3199 - DNA, 13 bp, Homo sapiens
  source 1..13: mol_type = genomic DNA
cacacacacacac

SEQ ID NO: 3200 - DNA, 14 bp, Homo sapiens
  source 1..14: mol_type = genomic DNA
acacacacacacac

SEQ ID NO: 3201 - DNA, 12 bp, Homo sapiens
  source 1..12: mol_type = genomic DNA
acacacacacac

SEQ ID NO: 3202 - DNA, 15 bp, Homo sapiens
  source 1..15: mol_type = genomic DNA
cacacacacacacac

SEQ ID NO: 3203 - DNA, 25 bp, Homo sapiens
  source 1..25: mol_type = genomic DNA
acacacacacacacacacacacaca

SEQ ID NO: 3204 - DNA, 12 bp, Homo sapiens
  source 1..12: mol_type = genomic DNA
acacacacacac

SEQ ID NO: 3205 - DNA, 35 bp, Homo sapiens
  source 1..35: mol_type = genomic DNA
acacacacacacacacacacacacacacacacaca

SEQ ID NO: 3206 - DNA, 34 bp, Homo sapiens
  source 1..34: mol_type = genomic DNA
cacacacacacacacacacacacacacacacaca

SEQ ID NO: 3207 - DNA, 13 bp, Homo sapiens
  source 1..13: mol_type = genomic DNA
acacacacacaca

SEQ ID NO: 3208 - DNA, 13 bp, Homo sapiens
  source 1..13: mol_type = genomic DNA
acacacacacaca

SEQ ID NO: 3209 - DNA, 16 bp, Homo sapiens
  source 1..16: mol_type = genomic DNA
acacacacacacacac

SEQ ID NO: 3210 - DNA, 42 bp, Homo sapiens; identical to SEQ ID NO: 3195
  source 1..42: mol_type = genomic DNA

SEQ ID NO: 3211 - DNA, 18 bp, Homo sapiens
  source 1..18: mol_type = genomic DNA
cacacacacacacacaca

SEQ ID NO: 3212 - DNA, 53 bp, Homo sapiens
  source 1..53: mol_type = genomic DNA
cacacacacacacacacacacacacacacacacacacacacacacacacacac

SEQ ID NO: 3213 - DNA, 40 bp, Homo sapiens
  source 1..40: mol_type = genomic DNA
cacacacacacacacacacacacacacacacacacacaca

SEQ ID NO: 3214 - DNA, 44 bp, Homo sapiens
  source 1..44: mol_type = genomic DNA
cacacacacacacacacacacacacacacacacacacacacaca

SEQ ID NO: 3215 - DNA, 21 bp, Homo sapiens
  source 1..21: mol_type = genomic DNA
acacacacacacacacacaca

SEQ ID NO: 3216 - DNA, 38 bp, Homo sapiens
  source 1..38: mol_type = genomic DNA
cacacacacacacacacacacacacacacacacacaca

SEQ ID NO: 3217 - DNA, 12 bp, Homo sapiens
  source 1..12: mol_type = genomic DNA
cacacacacaca

SEQ ID NO: 3218 - DNA, 30 bp, Homo sapiens
  source 1..30: mol_type = genomic DNA
acacacacacacacacacacacacacacac

SEQ ID NO: 3219 - DNA, 35 bp, Homo sapiens; identical to SEQ ID NO: 3157
  source 1..35: mol_type = genomic DNA

SEQ ID NO: 3220 - DNA, 12 bp, Homo sapiens
  source 1..12: mol_type = genomic DNA
acacacacacac

SEQ ID NO: 3221 - DNA, 12 bp, Homo sapiens
  source 1..12: mol_type = genomic DNA
cacacacacaca

SEQ ID NO: 3222 - DNA, 40 bp, Homo sapiens
  source 1..40: mol_type = genomic DNA
acacacacacacacacacacacacacacacacacacacac

SEQ ID NO: 3223 - DNA, 38 bp, Homo sapiens
  source 1..38: mol_type = genomic DNA
acacacacacacacacacacacacacacacacacacac

SEQ ID NO: 3224 - DNA, 36 bp, Homo sapiens; identical to SEQ ID NO: 3172
  source 1..36: mol_type = genomic DNA

SEQ ID NO: 3225 - DNA, 13 bp, Homo sapiens
  source 1..13: mol_type = genomic DNA
acacacacacaca

SEQ ID NO: 3226 - DNA, 12 bp, Homo sapiens
  source 1..12: mol_type = genomic DNA
cacacacacaca

SEQ ID NO: 3227 - DNA, 27 bp, Homo sapiens
  source 1..27: mol_type = genomic DNA
acacacacacacacacacacacacaca

SEQ ID NO: 3228 - DNA, 14 bp, Homo sapiens
  source 1..14: mol_type = genomic DNA
acacacacacacac

SEQ ID NO: 3229 - DNA, 13 bp, Homo sapiens
  source 1..13: mol_type = genomic DNA
acacacacacaca

SEQ ID NO: 3230 - DNA, 12 bp, Homo sapiens
  source 1..12: mol_type = genomic DNA
acacacacacac

SEQ ID NO: 3231 - DNA, 36 bp, Homo sapiens; identical to SEQ ID NO: 3172
  source 1..36: mol_type = genomic DNA

SEQ ID NO: 3232 - DNA, 24 bp, Homo sapiens
  source 1..24: mol_type = genomic DNA
acacacacacacacacacacacac

SEQ ID NO: 3233 - DNA, 36 bp, Homo sapiens; identical to SEQ ID NO: 3172
  source 1..36: mol_type = genomic DNA

SEQ ID NO: 3234 - DNA, 31 bp, Homo sapiens
  source 1..31: mol_type = genomic DNA
cacacacacacacacacacacacacacacac

SEQ ID NO: 3235 - DNA, 35 bp, Homo sapiens; identical to SEQ ID NO: 3157
  source 1..35: mol_type = genomic DNA

SEQ ID NO: 3236 - DNA, 43 bp, Homo sapiens; identical to SEQ ID NO: 3164
  source 1..43: mol_type = genomic DNA

SEQ ID NO: 3237 - DNA, 37 bp, Homo sapiens; identical to SEQ ID NO: 3179
  source 1..37: mol_type = genomic DNA

SEQ ID NO: 3238 - DNA, 16 bp, Homo sapiens
  source 1..16: mol_type = genomic DNA
acacacacacacacac

SEQ ID NO: 3239 - DNA, 13 bp, Homo sapiens
  source 1..13: mol_type = genomic DNA
acacacacacaca

SEQ ID NO: 3240 - DNA, 12 bp, Homo sapiens
  source 1..12: mol_type = genomic DNA
cacacacacaca

SEQ ID NO: 3241 - DNA, 43 bp, Homo sapiens; identical to SEQ ID NO: 3164
  source 1..43: mol_type = genomic DNA

SEQ ID NO: 3242 - DNA, 27 bp, Homo sapiens
  source 1..27: mol_type = genomic DNA
cacacacacacacacacacacacacac

SEQ ID NO: 3243 - DNA, 30 bp, Homo sapiens; identical to SEQ ID NO: 3218
  source 1..30: mol_type = genomic DNA

SEQ ID NO: 3244 - DNA, 39 bp, Homo sapiens
  source 1..39: mol_type = genomic DNA
acacacacacacacacacacacacacacacacacacaca

SEQ ID NO: 3245 - DNA, 39 bp, Homo sapiens; identical to SEQ ID NO: 3244
  source 1..39: mol_type = genomic DNA

SEQ ID NO: 3246 - DNA, 40 bp, Homo sapiens; identical to SEQ ID NO: 3222
  source 1..40: mol_type = genomic DNA

SEQ ID NO: 3247 - DNA, 16 bp, Homo sapiens
  source 1..16: mol_type = genomic DNA
cacacacacacacaca

SEQ ID NO: 3248 - DNA, 21 bp, Homo sapiens
  source 1..21: mol_type = genomic DNA
cacacacacacacacacacac

SEQ ID NO: 3249 - DNA, 13 bp, Homo sapiens
  source 1..13: mol_type = genomic DNA
cacacacacacac

SEQ ID NO: 3250 - DNA, 16 bp, Homo sapiens
  source 1..16: mol_type = genomic DNA
acacacacacacacac

SEQ ID NO: 3251 - DNA, 13 bp, Homo sapiens
  source 1..13: mol_type = genomic DNA
acacacacacaca

SEQ ID NO: 3252 - DNA, 32 bp, Homo sapiens
  source 1..32: mol_type = genomic DNA
cacacacacacacacacacacacacacacaca

SEQ ID NO: 3253 - DNA, 15 bp, Homo sapiens
  source 1..15: mol_type = genomic DNA
acacacacacacaca

SEQ ID NO: 3254 - DNA, 21 bp, Homo sapiens
  source 1..21: mol_type = genomic DNA
cacacacacacacacacacac

SEQ ID NO: 3255 - DNA, 20 bp, Homo sapiens
  source 1..20: mol_type = genomic DNA
cacacacacacacacacaca

SEQ ID NO: 3256 - DNA, 12 bp, Homo sapiens
  source 1..12: mol_type = genomic DNA
cacacacacaca

SEQ ID NO: 3257 - DNA, 13 bp, Homo sapiens
  source 1..13: mol_type = genomic DNA
cacacacacacac

SEQ ID NO: 3258 - DNA, 12 bp, Homo sapiens
  source 1..12: mol_type = genomic DNA
acacacacacac

SEQ ID NO: 3259 - DNA, 29 bp, Homo sapiens
  source 1..29: mol_type = genomic DNA
cacacacacacacacacacacacacacac

SEQ ID NO: 3260 - DNA, 13 bp, Homo sapiens
  source 1..13: mol_type = genomic DNA
acacacacacaca

SEQ ID NO: 3261 - DNA, 43 bp, Homo sapiens; identical to SEQ ID NO: 3164
  source 1..43: mol_type = genomic DNA

SEQ ID NO: 3262 - DNA, 35 bp, Homo sapiens; identical to SEQ ID NO: 3157
  source 1..35: mol_type = genomic DNA

SEQ ID NO: 3263 - DNA, 12 bp, Homo sapiens
  source 1..12: mol_type = genomic DNA
acacacacacac

SEQ ID NO: 3264 - DNA, 19 bp, Homo sapiens
  source 1..19: mol_type = genomic DNA
cacacacacacacacacac

SEQ ID NO: 3265 - DNA, 43 bp, Homo sapiens; identical to SEQ ID NO: 3164
  source 1..43: mol_type = genomic DNA

SEQ ID NO: 3266 - DNA, 12 bp, Homo sapiens
  source 1..12: mol_type = genomic DNA
acacacacacac

SEQ ID NO: 3267 - DNA, 13 bp, Homo sapiens
  source 1..13: mol_type = genomic DNA
acacacacacaca

SEQ ID NO: 3268 - DNA, 12 bp, Homo sapiens
  source 1..12: mol_type = genomic DNA
cacacacacaca

SEQ ID NO: 3269 - DNA, 22 bp, Homo sapiens
  source 1..22: mol_type = genomic DNA
acacacacacacacacacacac

SEQ ID NO: 3270 - DNA, 49 bp, Homo sapiens
  source 1..49: mol_type = genomic DNA
cacacacacacacacacacacacacacacacacacacacacacacacac

SEQ ID NO: 3271 - DNA, 43 bp, Homo sapiens; identical to SEQ ID NO: 3159
  source 1..43: mol_type = genomic DNA

SEQ ID NO: 3272 - DNA, 13 bp, Homo sapiens
  source 1..13: mol_type = genomic DNA
acacacacacaca

SEQ ID NO: 3273 - DNA, 39 bp, Homo sapiens; identical to SEQ ID NO: 3244
  source 1..39: mol_type = genomic DNA

SEQ ID NO: 3274 - DNA, 12 bp, Homo sapiens
  source 1..12: mol_type = genomic DNA
cacacacacaca

SEQ ID NO: 3275 - DNA, 35 bp, Homo sapiens; identical to SEQ ID NO: 3157
  source 1..35: mol_type = genomic DNA

SEQ ID NO: 3276 - DNA, 17 bp, Homo sapiens
  source 1..17: mol_type = genomic DNA
acacacacacacacaca

SEQ ID NO: 3277 - DNA, 19 bp, Homo sapiens
  source 1..19: mol_type = genomic DNA
acacacacacacacacaca

SEQ ID NO: 3278 - DNA, 15 bp, Homo sapiens
  source 1..15: mol_type = genomic DNA
acacacacacacaca

SEQ ID NO: 3279 - DNA, 20 bp, Homo sapiens
  source 1..20: mol_type = genomic DNA
cacacacacacacacacaca

SEQ ID NO: 3280 - DNA, 37 bp, Homo sapiens; identical to SEQ ID NO: 3175
  source 1..37: mol_type = genomic DNA

SEQ ID NO: 3281 - DNA, 12 bp, Homo sapiens
  source 1..12: mol_type = genomic DNA
cacacacacaca

SEQ ID NO: 3282 - DNA, 13 bp, Homo sapiens
  source 1..13: mol_type = genomic DNA
cacacacacacac

SEQ ID NO: 3283 - DNA, 45 bp, Homo sapiens
  source 1..45: mol_type = genomic DNA
cacacacacacacacacacacacacacacacacacacacacacac

SEQ ID NO: 3284 - DNA, 24 bp, Homo sapiens
  source 1..24: mol_type = genomic DNA
acacacacacacacacacacacac

SEQ ID NO: 3285 - DNA, 46 bp, Homo sapiens
  source 1..46: mol_type = genomic DNA
acacacacacacacacacacacacacacacacacacacacacacac

SEQ ID NO: 3286 - DNA, 35 bp, Homo sapiens; identical to SEQ ID NO: 3205
  source 1..35: mol_type = genomic DNA

SEQ ID NO: 3287 - DNA, 17 bp, Homo sapiens
  source 1..17: mol_type = genomic DNA
acacacacacacacaca

SEQ ID NO: 3288 - DNA, 42 bp, Homo sapiens
  source 1..42: mol_type = genomic DNA
cacacacacacacacacacacacacacacacacacacacaca

SEQ ID NO: 3289 - DNA, 15 bp, Homo sapiens
  source 1..15: mol_type = genomic DNA
cacacacacacacac

SEQ ID NO: 3290 - DNA, 29 bp, Homo sapiens
  source 1..29: mol_type = genomic DNA
acacacacacacacacacacacacacaca

SEQ ID NO: 3291 - DNA, 45 bp, Homo sapiens; identical to SEQ ID NO: 3283
  source 1..45: mol_type = genomic DNA

SEQ ID NO: 3292 - DNA, 12 bp, Homo sapiens
  source 1..12: mol_type = genomic DNA
acacacacacac

SEQ ID NO: 3293 - DNA, 20 bp, Homo sapiens
  source 1..20: mol_type = genomic DNA
acacacacacacacacacac

SEQ ID NO: 3294 - DNA, 42 bp, Homo sapiens; identical to SEQ ID NO: 3195
  source 1..42: mol_type = genomic DNA

SEQ ID NO: 3295 - DNA, 14 bp, Homo sapiens
  source 1..14: mol_type = genomic DNA
acacacacacacac

SEQ ID NO: 3296 - DNA, 19 bp, Homo sapiens
  source 1..19: mol_type = genomic DNA
cacacacacacacacacac

SEQ ID NO: 3297 - DNA, 17 bp, Homo sapiens
  source 1..17: mol_type = genomic DNA
cacacacacacacacac

SEQ ID NO: 3298 - DNA, 13 bp, Homo sapiens
  source 1..13: mol_type = genomic DNA
acacacacacaca

SEQ ID NO: 3299 - DNA, 14 bp, Homo sapiens
  source 1..14: mol_type = genomic DNA
acacacacacacac

SEQ ID NO: 3300 - DNA, 22 bp, Homo sapiens
  source 1..22: mol_type = genomic DNA
acacacacacacacacacacac

SEQ ID NO: 3301 - DNA, 15 bp, Homo sapiens
  source 1..15: mol_type = genomic DNA
acacacacacacaca

SEQ ID NO: 3302 - DNA, 42 bp, Homo sapiens; identical to SEQ ID NO: 3288
  source 1..42: mol_type = genomic DNA

SEQ ID NO: 3303 - DNA, 17 bp, Homo sapiens
  source 1..17: mol_type = genomic DNA
acacacacacacacaca

SEQ ID NO: 3304 - DNA, 26 bp, Homo sapiens
  source 1..26: mol_type = genomic DNA
acacacacacacacacacacacacac

SEQ ID NO: 3305 - DNA, 37 bp, Homo sapiens; identical to SEQ ID NO: 3175
  source 1..37: mol_type = genomic DNA

SEQ ID NO: 3306 - DNA, 14 bp, Homo sapiens
  source 1..14: mol_type = genomic DNA
cacacacacacaca

SEQ ID NO: 3307 - DNA, 18 bp, Homo sapiens
  source 1..18: mol_type = genomic DNA
acacacacacacacacac

SEQ ID NO: 3308 - DNA, 24 bp, Homo sapiens
  source 1..24: mol_type = genomic DNA
acacacacacacacacacacacac

SEQ ID NO: 3309 - DNA, 14 bp, Homo sapiens
  source 1..14: mol_type = genomic DNA
cacacacacacaca

SEQ ID NO: 3310 - DNA, 15 bp, Homo sapiens
  source 1..15: mol_type = genomic DNA
acacacacacacaca

SEQ ID NO: 3311 - DNA, 12 bp, Homo sapiens
  source 1..12: mol_type = genomic DNA
acacacacacac

SEQ ID NO: 3312 - DNA, 13 bp, Homo sapiens
  source 1..13: mol_type = genomic DNA
acacacacacaca

SEQ ID NO: 3313 - DNA, 13 bp, Homo sapiens
  source 1..13: mol_type = genomic DNA
acacacacacaca

SEQ ID NO: 3314 - DNA, 37 bp, Homo sapiens; identical to SEQ ID NO: 3179
  source 1..37: mol_type = genomic DNA

SEQ ID NO: 3315 - DNA, 13 bp, Homo sapiens
  source 1..13: mol_type = genomic DNA
acacacacacaca

SEQ ID NO: 3316 - DNA, 19 bp, Homo sapiens
  source 1..19: mol_type = genomic DNA
cacacacacacacacacac

SEQ ID NO: 3317 - DNA, 31 bp, Homo sapiens; identical to SEQ ID NO: 3181
  source 1..31: mol_type = genomic DNA

SEQ ID NO: 3318 - DNA, 37 bp, Homo sapiens; identical to SEQ ID NO: 3175
  source 1..37: mol_type = genomic DNA

SEQ ID NO: 3319 - DNA, 13 bp, Homo sapiens
  source 1..13: mol_type = genomic DNA
acacacacacaca

SEQ ID NO: 3320 - DNA, 25 bp, Homo sapiens
  source 1..25: mol_type = genomic DNA
cacacacacacacacacacacacac

SEQ ID NO: 3321 - DNA, 47 bp, Homo sapiens
  source 1..47: mol_type = genomic DNA
acacacacacacacacacacacacacacacacacacacacacacaca

SEQ ID NO: 3322 - DNA, 14 bp, Homo sapiens
  source 1..14: mol_type = genomic DNA
cacacacacacaca

SEQ ID NO: 3323 - DNA, 12 bp, Homo sapiens
  source 1..12: mol_type = genomic DNA
acacacacacac

SEQ ID NO: 3324 - DNA, 13 bp, Homo sapiens
  source 1..13: mol_type = genomic DNA
acacacacacaca

SEQ ID NO: 3325 - DNA, 14 bp, Homo sapiens
  source 1..14: mol_type = genomic DNA
cacacacacacaca

SEQ ID NO: 3326 - DNA, 12 bp, Homo sapiens
  source 1..12: mol_type = genomic DNA
cacacacacaca

SEQ ID NO: 3327 - DNA, 21 bp, Homo sapiens
  source 1..21: mol_type = genomic DNA
acacacacacacacacacaca

SEQ ID NO: 3328 - DNA, 17 bp, Homo sapiens
  source 1..17: mol_type = genomic DNA
acacacacacacacaca

SEQ ID NO: 3329 - DNA, 30 bp, Homo sapiens; identical to SEQ ID NO: 3218
  source 1..30: mol_type = genomic DNA

SEQ ID NO: 3330 - DNA, 38 bp, Homo sapiens; identical to SEQ ID NO: 3216
  source 1..38: mol_type = genomic DNA

SEQ ID NO: 3331 - DNA, 31 bp, Homo sapiens; identical to SEQ ID NO: 3234
  source 1..31: mol_type = genomic DNA

SEQ ID NO: 3332 - DNA, 42 bp, Homo sapiens; identical to SEQ ID NO: 3195
  source 1..42: mol_type = genomic DNA

SEQ ID NO: 3333 - DNA, 15 bp, Homo sapiens
  source 1..15: mol_type = genomic DNA
acacacacacacaca

SEQ ID NO: 3334 - DNA, 12 bp, Homo sapiens
  source 1..12: mol_type = genomic DNA
cacacacacaca

SEQ ID NO: 3335 - DNA, 17 bp, Homo sapiens
  source 1..17: mol_type = genomic DNA
acacacacacacacaca

SEQ ID NO: 3336 - DNA, 53 bp, Homo sapiens
  source 1..53: mol_type = genomic DNA
acacacacacacacacacacacacacacacacacacacacacacacacacaca

SEQ ID NO: 3337 - DNA, 37 bp, Homo sapiens; identical to SEQ ID NO: 3175
  source 1..37: mol_type = genomic DNA

SEQ ID NO: 3338 - DNA, 34 bp, Homo sapiens
  source 1..34: mol_type = genomic DNA
acacacacacacacacacacacacacacacacac

SEQ ID NO: 3339 - DNA, 32 bp, Homo sapiens
  source 1..32: mol_type = genomic DNA
acacacacacacacacacacacacacacacac

SEQ ID NO: 3340 - DNA, 44 bp, Homo sapiens; identical to SEQ ID NO: 3165
  source 1..44: mol_type = genomic DNA

SEQ ID NO: 3341 - DNA, 20 bp, Homo sapiens
  source 1..20: mol_type = genomic DNA
cacacacacacacacacaca

SEQ ID NO: 3342 - DNA, 39 bp, Homo sapiens; identical to SEQ ID NO: 3244
  source 1..39: mol_type = genomic DNA

SEQ ID NO: 3343 - DNA, 36 bp, Homo sapiens
  source 1..36: mol_type = genomic DNA
cacacacacacacacacacacacacacacacacaca

SEQ ID NO: 3344 - DNA, 15 bp, Homo sapiens
  source 1..15: mol_type = genomic DNA
cacacacacacacac

SEQ ID NO: 3345 - DNA, 13 bp, Homo sapiens
  source 1..13: mol_type = genomic DNA
cacacacacacac

SEQ ID NO: 3346 - DNA, 32 bp, Homo sapiens; identical to SEQ ID NO: 3252
  source 1..32: mol_type = genomic DNA

SEQ ID NO: 3347 - DNA, 12 bp, Homo sapiens
  source 1..12: mol_type = genomic DNA
cacacacacaca

SEQ ID NO: 3348 - DNA, 44 bp, Homo sapiens; identical to SEQ ID NO: 3165
  source 1..44: mol_type = genomic DNA

SEQ ID NO: 3349 - DNA, 13 bp, Homo sapiens
  source 1..13: mol_type = genomic DNA
acacacacacaca

SEQ ID NO: 3350 - DNA, 44 bp, Homo sapiens; identical to SEQ ID NO: 3214
  source 1..44: mol_type = genomic DNA

SEQ ID NO: 3351 - DNA, 12 bp, Homo sapiens
  source 1..12: mol_type = genomic DNA
cacacacacaca

SEQ ID NO: 3352 - DNA, 12 bp, Homo sapiens
  source 1..12: mol_type = genomic DNA
cacacacacaca

SEQ ID NO: 3353 - DNA, 51 bp, Homo sapiens; identical to SEQ ID NO: 3187
  source 1..51: mol_type = genomic DNA

SEQ ID NO: 3354 - DNA, 12 bp, Homo sapiens
  source 1..12: mol_type = genomic DNA
acacacacacac

SEQ ID NO: 3355 - DNA, 22 bp, Homo sapiens
  source 1..22: mol_type = genomic DNA
acacacacacacacacacacac

SEQ ID NO: 3356 - DNA, 15 bp, Homo sapiens
  source 1..15: mol_type = genomic DNA
acacacacacacaca

SEQ ID NO: 3357 - DNA, 42 bp, Homo sapiens; identical to SEQ ID NO: 3195
  source 1..42: mol_type = genomic DNA

SEQ ID NO: 3358 - DNA, 37 bp, Homo sapiens; identical to SEQ ID NO: 3175
  source 1..37: mol_type = genomic DNA

SEQ ID NO: 3359 - DNA, 15 bp, Homo sapiens
  source 1..15: mol_type = genomic DNA
acacacacacacaca

SEQ ID NO: 3360 - DNA, 23 bp, Homo sapiens
  source 1..23: mol_type = genomic DNA
acacacacacacacacacacaca

SEQ ID NO: 3361 - DNA, 15 bp, Homo sapiens
  source 1..15: mol_type = genomic DNA
cacacacacacacac

SEQ ID NO: 3362 - DNA, 21 bp, Homo sapiens
  source 1..21: mol_type = genomic DNA
cacacacacacacacacacac

SEQ ID NO: 3363 - DNA, 31 bp, Homo sapiens; identical to SEQ ID NO: 3234
  source 1..31: mol_type = genomic DNA

SEQ ID NO: 3364 - DNA, 42 bp, Homo sapiens; identical to SEQ ID NO: 3195
  source 1..42: mol_type = genomic DNA

SEQ ID NO: 3365 - DNA, 15 bp, Homo sapiens
  source 1..15: mol_type = genomic DNA
cacacacacacacac

SEQ ID NO: 3366 - DNA, 31 bp, Homo sapiens; identical to SEQ ID NO: 3181
  source 1..31: mol_type = genomic DNA

SEQ ID NO: 3367 - DNA, 17 bp, Homo sapiens
  source 1..17: mol_type = genomic DNA
acacacacacacacaca

SEQ ID NO: 3368 - DNA, 14 bp, Homo sapiens
  source 1..14: mol_type = genomic DNA
cacacacacacaca

SEQ ID NO: 3369 - DNA, 42 bp, Homo sapiens; identical to SEQ ID NO: 3195
  source 1..42: mol_type = genomic DNA

SEQ ID NO: 3370 - DNA, 29 bp, Homo sapiens
  source 1..29: mol_type = genomic DNA
cacacacacacacacacacacacacacac

SEQ ID NO: 3371 - DNA, 14 bp, Homo sapiens
  source 1..14: mol_type = genomic DNA
acacacacacacac

SEQ ID NO: 3372 - DNA, 12 bp, Homo sapiens
  source 1..12: mol_type = genomic DNA
cacacacacaca

SEQ ID NO: 3373 - DNA, 12 bp, Homo sapiens
  source 1..12: mol_type = genomic DNA
acacacacacac

SEQ ID NO: 3374 - DNA, 24 bp, Homo sapiens
  source 1..24: mol_type = genomic DNA
cacacacacacacacacacacaca

SEQ ID NO: 3375 - DNA, 32 bp, Homo sapiens; identical to SEQ ID NO: 3339
  source 1..32: mol_type = genomic DNA

SEQ ID NO: 3376 - DNA, 24 bp, Homo sapiens
  source 1..24: mol_type = genomic DNA
acacacacacacacacacacacac

SEQ ID NO: 3377 - DNA, 13 bp, Homo sapiens
  source 1..13: mol_type = genomic DNA
acacacacacaca

SEQ ID NO: 3378 - DNA, 23 bp, Homo sapiens
  source 1..23: mol_type = genomic DNA
acacacacacacacacacacaca

SEQ ID NO: 3379 - DNA, 31 bp, Homo sapiens; identical to SEQ ID NO: 3181
  source 1..31: mol_type = genomic DNA

SEQ ID NO: 3380 - DNA, 51 bp, Homo sapiens; identical to SEQ ID NO: 3187
  source 1..51: mol_type = genomic DNA

SEQ ID NO: 3381 - DNA, 40 bp, Homo sapiens; identical to SEQ ID NO: 3222
  source 1..40: mol_type = genomic DNA

SEQ ID NO: 3382 - DNA, 12 bp, Homo sapiens
  source 1..12: mol_type = genomic DNA
acacacacacac

SEQ ID NO: 3383 - DNA, 16 bp, Homo sapiens
  source 1..16: mol_type = genomic DNA
acacacacacacacac

SEQ ID NO: 3384 - DNA, 38 bp, Homo sapiens; identical to SEQ ID NO: 3216
  source 1..38: mol_type = genomic DNA

SEQ ID NO: 3385 - DNA, 12 bp, Homo sapiens
  source 1..12: mol_type = genomic DNA
cacacacacaca

SEQ ID NO: 3386 - DNA, 29 bp, Homo sapiens
  source 1..29: mol_type = genomic DNA
acacacacacacacacacacacacacaca

SEQ ID NO: 3387 - DNA, 43 bp, Homo sapiens; identical to SEQ ID NO: 3159
  source 1..43: mol_type = genomic DNA

SEQ ID NO: 3388 - DNA, 41 bp, Homo sapiens; identical to SEQ ID NO: 3170
  source 1..41: mol_type = genomic DNA

SEQ ID NO: 3389 - DNA, 23 bp, Homo sapiens
  source 1..23: mol_type = genomic DNA
cacacacacacacacacacacac

SEQ ID NO: 3390 - DNA, 47 bp, Homo sapiens; identical to SEQ ID NO: 3321
  source 1..47: mol_type = genomic DNA

SEQ ID NO: 3391 - DNA, 37 bp, Homo sapiens; identical to SEQ ID NO: 3179
  source 1..37: mol_type = genomic DNA

SEQ ID NO: 3392 - DNA, 34 bp, Homo sapiens; identical to SEQ ID NO: 3338
  source 1..34: mol_type = genomic DNA

SEQ ID NO: 3393 - DNA, 12 bp, Homo sapiens
  source 1..12: mol_type = genomic DNA
cacacacacaca

SEQ ID NO: 3394 - DNA, 17 bp, Homo sapiens
  source 1..17: mol_type = genomic DNA
acacacacacacacaca

SEQ ID NO: 3395 - DNA, 48 bp, Homo sapiens; identical to SEQ ID NO: 3193
  source 1..48: mol_type = genomic DNA

SEQ ID NO: 3396 - DNA, 15 bp, Homo sapiens
  source 1..15: mol_type = genomic DNA
acacacacacacaca

SEQ ID NO: 3397 - DNA, 43 bp, Homo sapiens; identical to SEQ ID NO: 3159
  source 1..43: mol_type = genomic DNA

SEQ ID NO: 3398 - DNA, 15 bp, Homo sapiens
  source 1..15: mol_type = genomic DNA
cacacacacacacac

SEQ ID NO: 3399 - DNA, 13 bp, Homo sapiens
  source 1..13: mol_type = genomic DNA
cacacacacacac

SEQ ID NO: 3400 - DNA, 12 bp, Homo sapiens
  source 1..12: mol_type = genomic DNA
acacacacacac

SEQ ID NO: 3401 - DNA, 32 bp, Homo sapiens; identical to SEQ ID NO: 3339
  source 1..32: mol_type = genomic DNA

SEQ ID NO: 3402 - DNA, 13 bp, Homo sapiens
  source 1..13: mol_type = genomic DNA
cacacacacacac

SEQ ID NO: 3403 - DNA, 25 bp, Homo sapiens
  source 1..25: mol_type = genomic DNA
acacacacacacacacacacacaca

SEQ ID NO: 3404 - DNA, 34 bp, Homo sapiens; identical to SEQ ID NO: 3338
  source 1..34: mol_type = genomic DNA

SEQ ID NO: 3405 - DNA, 28 bp, Homo sapiens
  source 1..28: mol_type = genomic DNA
cacacacacacacacacacacacacaca

SEQ ID NO: 3406 - DNA, 12 bp, Homo sapiens
  source 1..12: mol_type = genomic DNA
cacacacacaca

SEQ ID NO: 3407 - DNA, 14 bp, Homo sapiens
  source 1..14: mol_type = genomic DNA
cacacacacacaca

SEQ ID NO: 3408 - DNA, 13 bp, Homo sapiens
  source 1..13: mol_type = genomic DNA
acacacacacaca

SEQ ID NO: 3409 - DNA, 14 bp, Homo sapiens
  source 1..14: mol_type = genomic DNA
cacacacacacaca

SEQ ID NO: 3410 - DNA, 31 bp, Homo sapiens; identical to SEQ ID NO: 3181
  source 1..31: mol_type = genomic DNA

SEQ ID NO: 3411 - DNA, 42 bp, Homo sapiens; identical to SEQ ID NO: 3195
  source 1..42: mol_type = genomic DNA

SEQ ID NO: 3412 - DNA, 12 bp, Homo sapiens
  source 1..12: mol_type = genomic DNA
cacacacacaca

SEQ ID NO: 3413 - DNA, 48 bp, Homo sapiens
  source 1..48: mol_type = genomic DNA
cacacacacacacacacacacacacacacacacacacacacacacaca

SEQ ID NO: 3414 - DNA, 12 bp, Homo sapiens
  source 1..12: mol_type = genomic DNA
cacacacacaca

SEQ ID NO: 3415 - DNA, 16 bp, Homo sapiens
  source 1..16: mol_type = genomic DNA
cacacacacacacaca

SEQ ID NO: 3416 - DNA, 13 bp, Homo sapiens
  source 1..13: mol_type = genomic DNA
acacacacacaca

SEQ ID NO: 3417 - DNA, 15 bp, Homo sapiens
  source 1..15: mol_type = genomic DNA
acacacacacacaca

SEQ ID NO: 3418 - DNA, 28 bp, Homo sapiens
  source 1..28: mol_type = genomic DNA
cacacacacacacacacacacacacaca

SEQ ID NO: 3419 - DNA, 16 bp, Homo sapiens
  source 1..16: mol_type = genomic DNA
acacacacacacacac

SEQ ID NO: 3420 - DNA, 32 bp, Homo sapiens; identical to SEQ ID NO: 3339
  source 1..32: mol_type = genomic DNA

SEQ ID NO: 3421 - DNA, 12 bp, Homo sapiens
  source 1..12: mol_type = genomic DNA
cacacacacaca

SEQ ID NO: 3422 - DNA, 44 bp, Homo sapiens; identical to SEQ ID NO: 3214
  source 1..44: mol_type = genomic DNA

SEQ ID NO: 3423 - DNA, 12 bp, Homo sapiens
  source 1..12: mol_type = genomic DNA
acacacacacac

SEQ ID NO: 3424 - DNA, 12 bp, Homo sapiens
  source 1..12: mol_type = genomic DNA
acacacacacac

SEQ ID NO: 3425 - DNA, 21 bp, Homo sapiens
  source 1..21: mol_type = genomic DNA
cacacacacacacacacacac

SEQ ID NO: 3426 - DNA, 12 bp, Homo sapiens
  source 1..12: mol_type = genomic DNA
cacacacacaca

SEQ ID NO: 3427 - DNA, 32 bp, Homo sapiens; identical to SEQ ID NO: 3339
  source 1..32: mol_type = genomic DNA

SEQ ID NO: 3428 - DNA, 12 bp, Homo sapiens
  source 1..12: mol_type = genomic DNA
cacacacacaca

SEQ ID NO: 3429 - DNA, 15 bp, Homo sapiens
  source 1..15: mol_type = genomic DNA
cacacacacacacac

SEQ ID NO: 3430 - DNA, 20 bp, Homo sapiens
  source 1..20: mol_type = genomic DNA
acacacacacacacacacac

SEQ ID NO: 3431 - DNA, 14 bp, Homo sapiens
  source 1..14: mol_type = genomic DNA
acacacacacacac

SEQ ID NO: 3432 - DNA, 42 bp, Homo sapiens; identical to SEQ ID NO: 3195
  source 1..42: mol_type = genomic DNA

SEQ ID NO: 3433 - DNA, 21 bp, Homo sapiens
  source 1..21: mol_type = genomic DNA
cacacacacacacacacacac

SEQ ID NO: 3434 - DNA, 26 bp, Homo sapiens
  source 1..26: mol_type = genomic DNA
acacacacacacacacacacacacac

SEQ ID NO: 3435 - DNA, 12 bp, Homo sapiens
  source 1..12: mol_type = genomic DNA
cacacacacaca

SEQ ID NO: 3436 - DNA, 17 bp, Homo sapiens
  source 1..17: mol_type = genomic DNA
cacacacacacacacac

SEQ ID NO: 3437 - DNA, 13 bp, Homo sapiens
  source 1..13: mol_type = genomic DNA
acacacacacaca

SEQ ID NO: 3438 - DNA, 15 bp, Homo sapiens
  source 1..15: mol_type = genomic DNA
cacacacacacacac

SEQ ID NO: 3439 - DNA, 16 bp, Homo sapiens
  source 1..16: mol_type = genomic DNA
cacacacacacacaca

SEQ ID NO: 3440 - DNA, 30 bp, Homo sapiens; identical to SEQ ID NO: 3218
  source 1..30: mol_type = genomic DNA

SEQ ID NO: 3441 - DNA, 12 bp, Homo sapiens
  source 1..12: mol_type = genomic DNA
cacacacacaca

SEQ ID NO: 3442 - DNA, 13 bp, Homo sapiens
  source 1..13: mol_type = genomic DNA
acacacacacaca

SEQ ID NO: 3443 - DNA, 37 bp, Homo sapiens; identical to SEQ ID NO: 3179
  source 1..37: mol_type = genomic DNA

SEQ ID NO: 3444 - DNA, 12 bp, Homo sapiens
  source 1..12: mol_type = genomic DNA
acacacacacac

SEQ ID NO: 3445 - DNA, 15 bp, Homo sapiens
  source 1..15: mol_type = genomic DNA
acacacacacacaca

SEQ ID NO: 3446 - DNA, 12 bp, Homo sapiens
  source 1..12: mol_type = genomic DNA
acacacacacac

SEQ ID NO: 3447 - DNA, 44 bp, Homo sapiens; identical to SEQ ID NO: 3214
  source 1..44: mol_type = genomic DNA

SEQ ID NO: 3448 - DNA, 13 bp, Homo sapiens
  source 1..13: mol_type = genomic DNA
acacacacacaca

SEQ ID NO: 3449 - DNA, 35 bp, Homo sapiens; identical to SEQ ID NO: 3205
  source 1..35: mol_type = genomic DNA

SEQ ID NO: 3450 - DNA, 16 bp, Homo sapiens
  source 1..16: mol_type = genomic DNA
acacacacacacacac

SEQ ID NO: 3451 - DNA, 48 bp, Homo sapiens; identical to SEQ ID NO: 3193
  source 1..48: mol_type = genomic DNA

SEQ ID NO: 3452 - DNA, 17 bp, Homo sapiens
  source 1..17: mol_type = genomic DNA
acacacacacacacaca

SEQ ID NO: 3453 - DNA, 39 bp, Homo sapiens; identical to SEQ ID NO: 3244
  source 1..39: mol_type = genomic DNA

SEQ ID NO: 3454 - DNA, 38 bp, Homo sapiens; identical to SEQ ID NO: 3223
  source 1..38: mol_type = genomic DNA

SEQ ID NO: 3455 - DNA, 16 bp, Homo sapiens
  source 1..16: mol_type = genomic DNA
acacacacacacacac

SEQ ID NO: 3456 - DNA, 39 bp, Homo sapiens; identical to SEQ ID NO: 3244
  source 1..39: mol_type = genomic DNA

SEQ ID NO: 3457 - DNA, 13 bp, Homo sapiens
  source 1..13: mol_type = genomic DNA
acacacacacaca

SEQ ID NO: 3458 - DNA, 24 bp, Homo sapiens
  source 1..24: mol_type = genomic DNA
cacacacacacacacacacacaca

SEQ ID NO: 3459 - DNA, 19 bp, Homo sapiens
  source 1..19: mol_type = genomic DNA
cacacacacacacacacac

SEQ ID NO: 3460 - DNA, 12 bp, Homo sapiens
  source 1..12: mol_type = genomic DNA
acacacacacac

SEQ ID NO: 3461 - DNA, 26 bp, Homo sapiens
  source 1..26: mol_type = genomic DNA
cacacacacacacacacacacacaca

SEQ ID NO: 3462 - DNA, 12 bp, Homo sapiens
  source 1..12: mol_type = genomic DNA
cacacacacaca

SEQ ID NO: 3463 - DNA, 21 bp, Homo sapiens
  source 1..21: mol_type = genomic DNA
cacacacacacacacacacac

SEQ ID NO: 3464 - DNA, 32 bp, Homo sapiens; identical to SEQ ID NO: 3339
  source 1..32: mol_type = genomic DNA

SEQ ID NO: 3465 - DNA, 16 bp, Homo sapiens
  source 1..16: mol_type = genomic DNA
cacacacacacacaca

SEQ ID NO: 3466 - DNA, 19 bp, Homo sapiens
  source 1..19: mol_type = genomic DNA
acacacacacacacacaca

SEQ ID NO: 3467 - DNA, 14 bp, Homo sapiens
  source 1..14: mol_type = genomic DNA
cacacacacacaca

SEQ ID NO: 3468 - DNA, 26 bp, Homo sapiens
  source 1..26: mol_type = genomic DNA
acacacacacacacacacacacacac

SEQ ID NO: 3469 - DNA, 15 bp, Homo sapiens
  source 1..15: mol_type = genomic DNA
acacacacacacaca

SEQ ID NO: 3470 - DNA, 13 bp, Homo sapiens
  source 1..13: mol_type = genomic DNA
acacacacacaca

SEQ ID NO: 3471 - DNA, 49 bp, Homo sapiens
  source 1..49: mol_type = genomic DNA
acacacacacacacacacacacacacacacacacacacacacacacaca

SEQ ID NO: 3472 - DNA, 32 bp, Homo sapiens; identical to SEQ ID NO: 3339
  source 1..32: mol_type = genomic DNA

SEQ ID NO: 3473 - DNA, 35 bp, Homo sapiens; identical to SEQ ID NO: 3205
  source 1..35: mol_type = genomic DNA

SEQ ID NO: 3474 - DNA, 34 bp, Homo sapiens; identical to SEQ ID NO: 3338
  source 1..34: mol_type = genomic DNA

SEQ ID NO: 3475 - DNA, 23 bp, Homo sapiens
  source 1..23: mol_type = genomic DNA
acacacacacacacacacacaca

SEQ ID NO: 3476 - DNA, 20 bp, Homo sapiens
  source 1..20: mol_type = genomic DNA
cacacacacacacacacaca

SEQ ID NO: 3477 - DNA, 13 bp, Homo sapiens
  source 1..13: mol_type = genomic DNA
acacacacacaca

SEQ ID NO: 3478 - DNA, 28 bp, Homo sapiens
  source 1..28: mol_type = genomic DNA
acacacacacacacacacacacacacac

SEQ ID NO: 3479 - DNA, 25 bp, Homo sapiens
  source 1..25: mol_type = genomic DNA
cacacacacacacacacacacacac

SEQ ID NO: 3480 - DNA, 19 bp, Homo sapiens
  source 1..19: mol_type = genomic DNA
cacacacacacacacacac

SEQ ID NO: 3481 - DNA, 12 bp, Homo sapiens
  source 1..12: mol_type = genomic DNA
acacacacacac

SEQ ID NO: 3482 - DNA, 13 bp, Homo sapiens
  source 1..13: mol_type = genomic DNA
acacacacacaca

SEQ ID NO: 3483 - DNA, 14 bp, Homo sapiens
  source 1..14: mol_type = genomic DNA
cacacacacacaca

SEQ ID NO: 3484 - DNA, 25 bp, Homo sapiens
  source 1..25: mol_type = genomic DNA
cacacacacacacacacacacacac

SEQ ID NO: 3485 - DNA, 29 bp, Homo sapiens
  source 1..29: mol_type = genomic DNA
acacacacacacacacacacacacacaca

SEQ ID NO: 3486 - DNA, 34 bp, Homo sapiens; identical to SEQ ID NO: 3338
  source 1..34: mol_type = genomic DNA

SEQ ID NO: 3487 - DNA, 16 bp, Homo sapiens
  source 1..16: mol_type = genomic DNA
cacacacacacacaca

SEQ ID NO: 3488 - DNA, 49 bp, Homo sapiens; identical to SEQ ID NO: 3471
  source 1..49: mol_type = genomic DNA

SEQ ID NO: 3489 - DNA, 15 bp, Homo sapiens
  source 1..15: mol_type = genomic DNA
cacacacacacacac

SEQ ID NO: 3490 - DNA, 17 bp, Homo sapiens
  source 1..17: mol_type = genomic DNA
cacacacacacacacac

SEQ ID NO: 3491 - DNA, 47 bp, Homo sapiens; identical to SEQ ID NO: 3321
  source 1..47: mol_type = genomic DNA

SEQ ID NO: 3492 - DNA, 38 bp, Homo sapiens; identical to SEQ ID NO: 3223
  source 1..38: mol_type = genomic DNA

SEQ ID NO: 3493 - DNA, 12 bp, Homo sapiens
  source 1..12: mol_type = genomic DNA
acacacacacac

SEQ ID NO: 3494 - DNA, 12 bp, Homo sapiens
  source 1..12: mol_type = genomic DNA
cacacacacaca

SEQ ID NO: 3495 - DNA, 18 bp, Homo sapiens
  source 1..18: mol_type = genomic DNA
acacacacacacacacac

SEQ ID NO: 3496 - DNA, 13 bp, Homo sapiens
  source 1..13: mol_type = genomic DNA
cacacacacacac

SEQ ID NO: 3497 - DNA, 30 bp, Homo sapiens; identical to SEQ ID NO: 3218
  source 1..30: mol_type = genomic DNA

SEQ ID NO: 3498 - DNA, 32 bp, Homo sapiens; identical to SEQ ID NO: 3339
  source 1..32: mol_type = genomic DNA

SEQ ID NO: 3499 - DNA, 29 bp, Homo sapiens
  source 1..29: mol_type = genomic DNA
acacacacacacacacacacacacacaca

SEQ ID NO: 3500 - DNA, 13 bp, Homo sapiens
  source 1..13: mol_type = genomic DNA
cacacacacacac

SEQ ID NO: 3501 - DNA, 34 bp, Homo sapiens; identical to SEQ ID NO: 3206
  source 1..34: mol_type = genomic DNA

SEQ ID NO: 3502 - DNA, 42 bp, Homo sapiens; identical to SEQ ID NO: 3288
  source 1..42: mol_type = genomic DNA

SEQ ID NO: 3503 - DNA, 20 bp, Homo sapiens
  source 1..20: mol_type = genomic DNA
cacacacacacacacacaca

SEQ ID NO: 3504 - DNA, 33 bp, Homo sapiens
  source 1..33: mol_type = genomic DNA
acacacacacacacacacacacacacacacaca

SEQ ID NO: 3505 - DNA, 16 bp, Homo sapiens
  source 1..16: mol_type = genomic DNA
cacacacacacacaca

SEQ ID NO: 3506 - DNA, 31 bp, Homo sapiens; identical to SEQ ID NO: 3181
  source 1..31: mol_type = genomic DNA

SEQ ID NO: 3507 - DNA, 60 bp, Homo sapiens
  source 1..60: mol_type = genomic DNA
acacacacacacacacacacacacacacacacacacacacacacacacacacacacacac

SEQ ID NO: 3508 - DNA, 12 bp, Homo sapiens
  source 1..12: mol_type = genomic DNA
cacacacacaca

SEQ ID NO: 3509 - DNA, 30 bp, Homo sapiens; identical to SEQ ID NO: 3218
  source 1..30: mol_type = genomic DNA

SEQ ID NO: 3510 - DNA, 12 bp, Homo sapiens
  source 1..12: mol_type = genomic DNA
acacacacacac

SEQ ID NO: 3511 - DNA, 26 bp, Homo sapiens
  source 1..26: mol_type = genomic DNA
acacacacacacacacacacacacac

SEQ ID NO: 3512 - DNA, 21 bp, Homo sapiens
  source 1..21: mol_type = genomic DNA
cacacacacacacacacacac

SEQ ID NO: 3513 - DNA, 32 bp, Homo sapiens; identical to SEQ ID NO: 3339
  source 1..32: mol_type = genomic DNA

SEQ ID NO: 3514 - DNA, 12 bp, Homo sapiens
  source 1..12: mol_type = genomic DNA
cacacacacaca

SEQ ID NO: 3515 - DNA, 12 bp, Homo sapiens
  source 1..12: mol_type = genomic DNA
acacacacacac

SEQ ID NO: 3516 - DNA, 23 bp, Homo sapiens
  source 1..23: mol_type = genomic DNA
acacacacacacacacacacaca

SEQ ID NO: 3517 - DNA, 44 bp, Homo sapiens; identical to SEQ ID NO: 3214
  source 1..44: mol_type = genomic DNA

SEQ ID NO: 3518 - DNA, 37 bp, Homo sapiens; identical to SEQ ID NO: 3175
  source 1..37: mol_type = genomic DNA

SEQ ID NO: 3519 - DNA, 12 bp, Homo sapiens
  source 1..12: mol_type = genomic DNA
cacacacacaca

SEQ ID NO: 3520 - DNA, 33 bp, Homo sapiens; identical to SEQ ID NO: 3504
  source 1..33: mol_type = genomic DNA

SEQ ID NO: 3521 - DNA, 44 bp, Homo sapiens; identical to SEQ ID NO: 3214
  source 1..44: mol_type = genomic DNA

SEQ ID NO: 3522 - DNA, 27 bp, Homo sapiens
  source 1..27: mol_type = genomic DNA
acacacacacacacacacacacacaca

SEQ ID NO: 3523 - DNA, 13 bp, Homo sapiens
  source 1..13: mol_type = genomic DNA
acacacacacaca

SEQ ID NO: 3524 - DNA, 15 bp, Homo sapiens
  source 1..15: mol_type = genomic DNA
acacacacacacaca

SEQ ID NO: 3525 - DNA, 28 bp, Homo sapiens
  source 1..28: mol_type = genomic DNA
cacacacacacacacacacacacacaca

SEQ ID NO: 3526 - DNA, 14 bp, Homo sapiens
  source 1..14: mol_type = genomic DNA
acacacacacacac

SEQ ID NO: 3527 - DNA, 37 bp, Homo sapiens; identical to SEQ ID NO: 3179
  source 1..37: mol_type = genomic DNA

SEQ ID NO: 3528 - DNA, 36 bp, Homo sapiens; identical to SEQ ID NO: 3172
  source 1..36: mol_type = genomic DNA

SEQ ID NO: 3529 - DNA, 29 bp, Homo sapiens
  source 1..29: mol_type = genomic DNA
acacacacacacacacacacacacacaca

SEQ ID NO: 3530 - DNA, 12 bp, Homo sapiens
  source 1..12: mol_type = genomic DNA
cacacacacaca

SEQ ID NO: 3531 - DNA, 12 bp, Homo sapiens
  source 1..12: mol_type = genomic DNA
acacacacacac

SEQ ID NO: 3532 - DNA, 13 bp, Homo sapiens
  source 1..13: mol_type = genomic DNA
acacacacacaca

SEQ ID NO: 3533 - DNA, 38 bp, Homo sapiens; identical to SEQ ID NO: 3223
  source 1..38: mol_type = genomic DNA

SEQ ID NO: 3534 - DNA, 38 bp, Homo sapiens; identical to SEQ ID NO: 3223
  source 1..38: mol_type = genomic DNA

SEQ ID NO: 3535 - DNA, 12 bp, Homo sapiens
  source 1..12: mol_type = genomic DNA
cacacacacaca

SEQ ID NO: 3536 - DNA, 23 bp, Homo sapiens
  source 1..23: mol_type = genomic DNA
acacacacacacacacacacaca

SEQ ID NO: 3537 - DNA, 30 bp, Homo sapiens; identical to SEQ ID NO: 3218
  source 1..30: mol_type = genomic DNA

SEQ ID NO: 3538 - DNA, 38 bp, Homo sapiens; identical to SEQ ID NO: 3223
  source 1..38: mol_type = genomic DNA

SEQ ID NO: 3539 - DNA, 20 bp, Homo sapiens
  source 1..20: mol_type = genomic DNA
acacacacacacacacacac

SEQ ID NO: 3540 - DNA, 34 bp, Homo sapiens; identical to SEQ ID NO: 3338
  source 1..34: mol_type = genomic DNA

SEQ ID NO: 3541 - DNA, 28 bp, Homo sapiens
  source 1..28: mol_type = genomic DNA
acacacacacacacacacacacacacac

SEQ ID NO: 3542 - DNA, 12 bp, Homo sapiens
  source 1..12: mol_type = genomic DNA
acacacacacac

SEQ ID NO: 3543 - DNA, 12 bp, Homo sapiens
  source 1..12: mol_type = genomic DNA
acacacacacac

SEQ ID NO: 3544 - DNA, 34 bp, Homo sapiens; identical to SEQ ID NO: 3338
  source 1..34: mol_type = genomic DNA

SEQ ID NO: 3545 - DNA, 44 bp, Homo sapiens; identical to SEQ ID NO: 3165
  source 1..44: mol_type = genomic DNA

SEQ ID NO: 3546 - DNA, 12 bp, Homo sapiens
  source 1..12: mol_type = genomic DNA
cacacacacaca

SEQ ID NO: 3547 - DNA, 14 bp, Homo sapiens
  source 1..14: mol_type = genomic DNA
cacacacacacaca

SEQ ID NO: 3548 - DNA, 36 bp, Homo sapiens; identical to SEQ ID NO: 3343
  source 1..36: mol_type = genomic DNA

SEQ ID NO: 3549 - DNA, 51 bp, Homo sapiens; identical to SEQ ID NO: 3187
  source 1..51: mol_type = genomic DNA

SEQ ID NO: 3550 - DNA, 48 bp, Homo sapiens; identical to SEQ ID NO: 3193
  source 1..48: mol_type = genomic DNA

SEQ ID NO: 3551 - DNA, 59 bp, Homo sapiens
  source 1..59: mol_type = genomic DNA
acacacacacacacacacacacacacacacacacacacacacacacacacacacacaca

SEQ ID NO: 3552 - DNA, 20 bp, Homo sapiens
  source 1..20: mol_type = genomic DNA
acacacacacacacacacac

SEQ ID NO: 3553 - DNA, 38 bp, Homo sapiens; identical to SEQ ID NO: 3223
  source 1..38: mol_type = genomic DNA

SEQ ID NO: 3554 - DNA, 43 bp, Homo sapiens; identical to SEQ ID NO: 3159
  source 1..43: mol_type = genomic DNA

SEQ ID NO: 3555 - DNA, 38 bp, Homo sapiens; identical to SEQ ID NO: 3223
  source 1..38: mol_type = genomic DNA

SEQ ID NO: 3556 - DNA, 13 bp, Homo sapiens
  source 1..13: mol_type = genomic DNA
acacacacacaca

SEQ ID NO: 3557 - DNA, 12 bp, Homo sapiens
  source 1..12: mol_type = genomic DNA
cacacacacaca

SEQ ID NO: 3558 - DNA, 38 bp, Homo sapiens; identical to SEQ ID NO: 3223
  source 1..38: mol_type = genomic DNA

SEQ ID NO: 3559 - DNA, 20 bp, Homo sapiens
  source 1..20: mol_type = genomic DNA
acacacacacacacacacac

SEQ ID NO: 3560 - DNA, 48 bp, Homo sapiens; identical to SEQ ID NO: 3193
  source 1..48: mol_type = genomic DNA

SEQ ID NO: 3561 - DNA, 23 bp, Homo sapiens
  source 1..23: mol_type = genomic DNA
acacacacacacacacacacaca

SEQ ID NO: 3562 - DNA, 47 bp, Homo sapiens; identical to SEQ ID NO: 3321
  source 1..47: mol_type = genomic DNA

SEQ ID NO: 3563 - DNA, 42 bp, Homo sapiens; identical to SEQ ID NO: 3195
  source 1..42: mol_type = genomic DNA

SEQ ID NO: 3564 - DNA, 46 bp, Homo sapiens; identical to SEQ ID NO: 3285
  source 1..46: mol_type = genomic DNA

SEQ ID NO: 3565 - DNA, 31 bp, Homo sapiens; identical to SEQ ID NO: 3181
  source 1..31: mol_type = genomic DNA

SEQ ID NO: 3566 - DNA, 14 bp, Homo sapiens
  source 1..14: mol_type = genomic DNA
acacacacacacac

SEQ ID NO: 3567 - DNA, 25 bp, Homo sapiens
  source 1..25: mol_type = genomic DNA
cacacacacacacacacacacacac

SEQ ID NO: 3568 - DNA, 42 bp, Homo sapiens; identical to SEQ ID NO: 3195
  source 1..42: mol_type = genomic DNA

SEQ ID NO: 3569 - DNA, 50 bp, Homo sapiens; identical to SEQ ID NO: 3185
  source 1..50: mol_type = genomic DNA

SEQ ID NO: 3570 - DNA, 46 bp, Homo sapiens
  source 1..46: mol_type = genomic DNA
cacacacacacacacacacacacacacacacacacacacacacaca

SEQ ID NO: 3571 - DNA, 46 bp, Homo sapiens; identical to SEQ ID NO: 3285
  source 1..46: mol_type = genomic DNA

SEQ ID NO: 3572 - DNA, 12 bp, Homo sapiens
  source 1..12: mol_type = genomic DNA
acacacacacac

SEQ ID NO: 3573 - DNA, 13 bp, Homo sapiens
  source 1..13: mol_type = genomic DNA
cacacacacacac

SEQ ID NO: 3574 - DNA, 36 bp, Homo sapiens; identical to SEQ ID NO: 3343
  source 1..36: mol_type = genomic DNA

SEQ ID NO: 3575 - DNA, 42 bp, Homo sapiens; identical to SEQ ID NO: 3195
  source 1..42: mol_type = genomic DNA

SEQ ID NO: 3576 - DNA, 21 bp, Homo sapiens
  source 1..21: mol_type = genomic DNA
cacacacacacacacacacac

SEQ ID NO: 3577 - DNA, 29 bp, Homo sapiens
  source 1..29: mol_type = genomic DNA
acacacacacacacacacacacacacaca

SEQ ID NO: 3578 - DNA, 33 bp, Homo sapiens
  source 1..33: mol_type = genomic DNA
cacacacacacacacacacacacacacacacac

SEQ ID NO: 3579 - DNA, 19 bp, Homo sapiens
  source 1..19: mol_type = genomic DNA
acacacacacacacacaca

SEQ ID NO: 3580 - DNA, 39 bp, Homo sapiens; identical to SEQ ID NO: 3244
  source 1..39: mol_type = genomic DNA

SEQ ID NO: 3581 - DNA, 25 bp, Homo sapiens
  source 1..25: mol_type = genomic DNA
acacacacacacacacacacacaca

SEQ ID NO: 3582 - DNA, 31 bp, Homo sapiens; identical to SEQ ID NO: 3234
  source 1..31: mol_type = genomic DNA

SEQ ID NO: 3583 - DNA, 37 bp, Homo sapiens; identical to SEQ ID NO: 3179
  source 1..37: mol_type = genomic DNA

SEQ ID NO: 3584 - DNA, 21 bp, Homo sapiens
  source 1..21: mol_type = genomic DNA
cacacacacacacacacacac

SEQ ID NO: 3585 - DNA, 20 bp, Homo sapiens
  source 1..20: mol_type = genomic DNA
acacacacacacacacacac

SEQ ID NO: 3586 - DNA, 30 bp, Homo sapiens; identical to SEQ ID NO: 3218
  source 1..30: mol_type = genomic DNA

SEQ ID NO: 3587 - DNA, 12 bp, Homo sapiens
  source 1..12: mol_type = genomic DNA
cacacacacaca

SEQ ID NO: 3588 - DNA, 16 bp, Homo sapiens
  source 1..16: mol_type = genomic DNA
cacacacacacacaca

SEQ ID NO: 3589 - DNA, 47 bp, Homo sapiens; identical to SEQ ID NO: 3321
  source 1..47: mol_type = genomic DNA

SEQ ID NO: 3590 - DNA, 31 bp, Homo sapiens; identical to SEQ ID NO: 3181
  source 1..31: mol_type = genomic DNA

SEQ ID NO: 3591 - DNA, 25 bp, Homo sapiens
  source 1..25: mol_type = genomic DNA
cacacacacacacacacacacacac

SEQ ID NO: 3592 - DNA, 17 bp, Homo sapiens
  source 1..17: mol_type = genomic DNA
cacacacacacacacac

SEQ ID NO: 3593 - DNA, 29 bp, Homo sapiens
  source 1..29: mol_type = genomic DNA
cacacacacacacacacacacacacacac

SEQ ID NO: 3594 - DNA, 46 bp, Homo sapiens; identical to SEQ ID NO: 3285
  source 1..46: mol_type = genomic DNA

SEQ ID NO: 3595 - DNA, 12 bp, Homo sapiens
  source 1..12: mol_type = genomic DNA
acacacacacac

SEQ ID NO: 3596 - DNA, 13 bp, Homo sapiens
  source 1..13: mol_type = genomic DNA
acacacacacaca

SEQ ID NO: 3597 - DNA, 12 bp, Homo sapiens
  source 1..12: mol_type = genomic DNA
cacacacacaca

SEQ ID NO: 3598 - DNA, 30 bp, Homo sapiens; identical to SEQ ID NO: 3218
  source 1..30: mol_type = genomic DNA

SEQ ID NO: 3599 - DNA, 12 bp, Homo sapiens
  source 1..12: mol_type = genomic DNA
cacacacacaca

SEQ ID NO: 3600 - DNA, 15 bp, Homo sapiens
  source 1..15: mol_type = genomic DNA
acacacacacacaca

SEQ ID NO: 3601 - DNA, 13 bp, Homo sapiens
  source 1..13: mol_type = genomic DNA
cacacacacacac

SEQ ID NO: 3602 - DNA, 47 bp, Homo sapiens; identical to SEQ ID NO: 3196
  source 1..47: mol_type = genomic DNA

SEQ ID NO: 3603 - DNA, 13 bp, Homo sapiens
  source 1..13: mol_type = genomic DNA
acacacacacaca

SEQ ID NO: 3604 - DNA, 16 bp, Homo sapiens
  source 1..16: mol_type = genomic DNA
acacacacacacacac

SEQ ID NO: 3605 - DNA, 12 bp, Homo sapiens
  source 1..12: mol_type = genomic DNA
cacacacacaca

SEQ ID NO: 3606 - DNA, 20 bp, Homo sapiens
  source 1..20: mol_type = genomic DNA
acacacacacacacacacac

SEQ ID NO: 3607 - DNA, 32 bp, Homo sapiens; identical to SEQ ID NO: 3252
  source 1..32: mol_type = genomic DNA

SEQ ID NO: 3608 - DNA, 12 bp, Homo sapiens
  source 1..12: mol_type = genomic DNA
cacacacacaca

SEQ ID NO: 3609 - DNA, 41 bp, Homo sapiens; identical to SEQ ID NO: 3170
  source 1..41: mol_type = genomic DNA

SEQ ID NO: 3610 - DNA, 12 bp, Homo sapiens
  source 1..12: mol_type = genomic DNA
cacacacacaca

SEQ ID NO: 3611 - DNA, 46 bp, Homo sapiens; identical to SEQ ID NO: 3570
  source 1..46: mol_type = genomic DNA

SEQ ID NO: 3612 - DNA, 43 bp, Homo sapiens; identical to SEQ ID NO: 3159
  source 1..43: mol_type = genomic DNA

SEQ ID NO: 3613 - DNA, 13 bp, Homo sapiens
  source 1..13: mol_type = genomic DNA
cacacacacacac

SEQ ID NO: 3614 - DNA, 21 bp, Homo sapiens
  source 1..21: mol_type = genomic DNA
acacacacacacacacacaca

SEQ ID NO: 3615 - DNA, 15 bp, Homo sapiens
  source 1..15: mol_type = genomic DNA
acacacacacacaca

SEQ ID NO: 3616 - DNA, 13 bp, Homo sapiens
  source 1..13: mol_type = genomic DNA
acacacacacaca

SEQ ID NO: 3617 - DNA, 27 bp, Homo sapiens
  source 1..27: mol_type = genomic DNA
acacacacacacacacacacacacaca

SEQ ID NO: 3618 - DNA, 13 bp, Homo sapiens
  source 1..13: mol_type = genomic DNA
acacacacacaca

SEQ ID NO: 3619 - DNA, 33 bp, Homo sapiens; identical to SEQ ID NO: 3504
  source 1..33: mol_type = genomic DNA

SEQ ID NO: 3620 - DNA, 18 bp, Homo sapiens
  source 1..18: mol_type = genomic DNA
cacacacacacacacaca

SEQ ID NO: 3621 - DNA, 36 bp, Homo sapiens; identical to SEQ ID NO: 3172
  source 1..36: mol_type = genomic DNA

SEQ ID NO: 3622 - DNA, 23 bp, Homo sapiens
  source 1..23: mol_type = genomic DNA
acacacacacacacacacacaca

SEQ ID NO: 3623 - DNA, 13 bp, Homo sapiens
  source 1..13: mol_type = genomic DNA
acacacacacaca

SEQ ID NO: 3624 - DNA, 12 bp, Homo sapiens
  source 1..12: mol_type = genomic DNA
cacacacacaca

SEQ ID NO: 3625 - DNA, 12 bp, Homo sapiens
  source 1..12: mol_type = genomic DNA
cacacacacaca

SEQ ID NO: 3626 - DNA, 12 bp, Homo sapiens
  source 1..12: mol_type = genomic DNA
cacacacacaca

SEQ ID NO: 3627 - DNA, 15 bp, Homo sapiens
  source 1..15: mol_type = genomic DNA
cacacacacacacac

SEQ ID NO: 3628 - DNA, 13 bp, Homo sapiens
  source 1..13: mol_type = genomic DNA
acacacacacaca

SEQ ID NO: 3629 - DNA, 12 bp, Homo sapiens
  source 1..12: mol_type = genomic DNA
cacacacacaca

SEQ ID NO: 3630 - DNA, 16 bp, Homo sapiens
  source 1..16: mol_type = genomic DNA
acacacacacacacac

SEQ ID NO: 3631 - DNA, 12 bp, Homo sapiens
  source 1..12: mol_type = genomic DNA
cacacacacaca

SEQ ID NO: 3632 - DNA, 12 bp, Homo sapiens
  source 1..12: mol_type = genomic DNA
acacacacacac

SEQ ID NO: 3633 - DNA, 12 bp, Homo sapiens
  source 1..12: mol_type = genomic DNA
cacacacacaca

SEQ ID NO: 3634 - DNA, 18 bp, Homo sapiens
  source 1..18: mol_type = genomic DNA
acacacacacacacacac

SEQ ID NO: 3635 - DNA, 12 bp, Homo sapiens
  source 1..12: mol_type = genomic DNA
acacacacacac

SEQ ID NO: 3636 - DNA, 20 bp, Homo sapiens
  source 1..20: mol_type = genomic DNA
acacacacacacacacacac

SEQ ID NO: 3637 - DNA, 28 bp, Homo sapiens
  source 1..28: mol_type = genomic DNA
acacacacacacacacacacacacacac

SEQ ID NO: 3638 - DNA, 12 bp, Homo sapiens
  source 1..12: mol_type = genomic DNA
cacacacacaca

SEQ ID NO: 3639 - DNA, 20 bp, Homo sapiens
  source 1..20: mol_type = genomic DNA
acacacacacacacacacac

SEQ ID NO: 3640 - DNA, 38 bp, Homo sapiens; identical to SEQ ID NO: 3223
  source 1..38: mol_type = genomic DNA

SEQ ID NO: 3641 - DNA, 15 bp, Homo sapiens
  source 1..15: mol_type = genomic DNA
acacacacacacaca

SEQ ID NO: 3642 - DNA, 14 bp, Homo sapiens
  source 1..14: mol_type = genomic DNA
acacacacacacac

SEQ ID NO: 3643 - DNA, 42 bp, Homo sapiens; identical to SEQ ID NO: 3195
  source 1..42: mol_type = genomic DNA

SEQ ID NO: 3644 - DNA, 50 bp, Homo sapiens; identical to SEQ ID NO: 3185
  source 1..50: mol_type = genomic DNA

SEQ ID NO: 3645 - DNA, 26 bp, Homo sapiens
  source 1..26: mol_type = genomic DNA
acacacacacacacacacacacacac

SEQ ID NO: 3646 - DNA, 18 bp, Homo sapiens
  source 1..18: mol_type = genomic DNA
acacacacacacacacac

SEQ ID NO: 3647 - DNA, 47 bp, Homo sapiens; identical to SEQ ID NO: 3321
  source 1..47: mol_type = genomic DNA

SEQ ID NO: 3648 - DNA, 13 bp, Homo sapiens
  source 1..13: mol_type = genomic DNA
cacacacacacac

SEQ ID NO: 3649 - DNA, 13 bp, Homo sapiens
  source 1..13: mol_type = genomic DNA
acacacacacaca

SEQ ID NO: 3650 - DNA, 46 bp, Homo sapiens; identical to SEQ ID NO: 3570
  source 1..46: mol_type = genomic DNA

SEQ ID NO: 3651 - DNA, 13 bp, Homo sapiens
  source 1..13: mol_type = genomic DNA
acacacacacaca

SEQ ID NO: 3652 - DNA, 19 bp, Homo sapiens
  source 1..19: mol_type = genomic DNA
acacacacacacacacaca

SEQ ID NO: 3653 - DNA, 34 bp, Homo sapiens; identical to SEQ ID NO: 3206
  source 1..34: mol_type = genomic DNA

SEQ ID NO: 3654 - DNA, 37 bp, Homo sapiens; identical to SEQ ID NO: 3179
  source 1..37: mol_type = genomic DNA

SEQ ID NO: 3655 - DNA, 41 bp, Homo sapiens; identical to SEQ ID NO: 3163
  source 1..41: mol_type = genomic DNA

SEQ ID NO: 3656 - DNA, 21 bp, Homo sapiens
  source 1..21: mol_type = genomic DNA
cacacacacacacacacacac

SEQ ID NO: 3657 - DNA, 12 bp, Homo sapiens
  source 1..12: mol_type = genomic DNA
cacacacacaca

SEQ ID NO: 3658 - DNA, 14 bp, Homo sapiens
  source 1..14: mol_type = genomic DNA
acacacacacacac

SEQ ID NO: 3659 - DNA, 12 bp, Homo sapiens
  source 1..12: mol_type = genomic DNA
acacacacacac

SEQ ID NO: 3660 - DNA, 21 bp, Homo sapiens
  source 1..21: mol_type = genomic DNA
acacacacacacacacacaca

SEQ ID NO: 3661 - DNA, 15 bp, Homo sapiens
  source 1..15: mol_type = genomic DNA
acacacacacacaca

SEQ ID NO: 3662 - DNA, 23 bp, Homo sapiens
  source 1..23: mol_type = genomic DNA
acacacacacacacacacacaca

SEQ ID NO: 3663 - DNA, 12 bp, Homo sapiens
  source 1..12: mol_type = genomic DNA
acacacacacac

SEQ ID NO: 3664 - DNA, 36 bp, Homo sapiens; identical to SEQ ID NO: 3172
  source 1..36: mol_type = genomic DNA

SEQ ID NO: 3665 - DNA, 29 bp, Homo sapiens
  source 1..29: mol_type = genomic DNA
cacacacacacacacacacacacacacac

SEQ ID NO: 3666 - DNA, 16 bp, Homo sapiens
  source 1..16: mol_type = genomic DNA
cacacacacacacaca

SEQ ID NO: 3667 - DNA, 24 bp, Homo sapiens
  source 1..24: mol_type = genomic DNA
cacacacacacacacacacacaca

SEQ ID NO: 3668 - DNA, 12 bp, Homo sapiens
  source 1..12: mol_type = genomic DNA
acacacacacac

SEQ ID NO: 3669 - DNA, 13 bp, Homo sapiens
  source 1..13: mol_type = genomic DNA
acacacacacaca

SEQ ID NO: 3670 - DNA, 13 bp, Homo sapiens
  source 1..13: mol_type = genomic DNA
acacacacacaca

SEQ ID NO: 3671 - DNA, 33 bp, Homo sapiens; identical to SEQ ID NO: 3504
  source 1..33: mol_type = genomic DNA

SEQ ID NO: 3672 - DNA, 13 bp, Homo sapiens
  source 1..13: mol_type = genomic DNA
acacacacacaca

SEQ ID NO: 3673 - DNA, 40 bp, Homo sapiens; identical to SEQ ID NO: 3222
  source 1..40: mol_type = genomic DNA

SEQ ID NO: 3674 - DNA, 33 bp, Homo sapiens; identical to SEQ ID NO: 3578
  source 1..33: mol_type = genomic DNA

SEQ ID NO: 3675 - DNA, 36 bp, Homo sapiens; identical to SEQ ID NO: 3172
  source 1..36: mol_type = genomic DNA

SEQ ID NO: 3676 - DNA, 22 bp, Homo sapiens
  source 1..22: mol_type = genomic DNA
acacacacacacacacacacac

SEQ ID NO: 3677 - DNA, 12 bp, Homo sapiens
  source 1..12: mol_type = genomic DNA
acacacacacac

SEQ ID NO: 3678 - DNA, 12 bp, Homo sapiens
  source 1..12: mol_type = genomic DNA
cacacacacaca

SEQ ID NO: 3679 - DNA, 17 bp, Homo sapiens
  source 1..17: mol_type = genomic DNA
acacacacacacacaca

SEQ ID NO: 3680 - DNA, 26 bp, Homo sapiens
  source 1..26: mol_type = genomic DNA
acacacacacacacacacacacacac

SEQ ID NO: 3681 - DNA, 27 bp, Homo sapiens
  source 1..27: mol_type = genomic DNA
cacacacacacacacacacacacacac

SEQ ID NO: 3682 - DNA, 31 bp, Homo sapiens; identical to SEQ ID NO: 3181
  source 1..31: mol_type = genomic DNA

SEQ ID NO: 3683 - DNA, 16 bp, Homo sapiens
  source 1..16: mol_type = genomic DNA
cacacacacacacaca

SEQ ID NO: 3684 - DNA, 14 bp, Homo sapiens
  source 1..14: mol_type = genomic DNA
cacacacacacaca

SEQ ID NO: 3685 - DNA, 19 bp, Homo sapiens
  source 1..19: mol_type = genomic DNA
acacacacacacacacaca

SEQ ID NO: 3686 - DNA, 37 bp, Homo sapiens; identical to SEQ ID NO: 3179
  source 1..37: mol_type = genomic DNA

SEQ ID NO: 3687 - DNA, 26 bp, Homo sapiens
  source 1..26: mol_type = genomic DNA
acacacacacacacacacacacacac

SEQ ID NO: 3688 - DNA, 31 bp, Homo sapiens; identical to SEQ ID NO: 3234
  source 1..31: mol_type = genomic DNA

SEQ ID NO: 3689 - DNA, 45 bp, Homo sapiens
  source 1..45: mol_type = genomic DNA
acacacacacacacacacacacacacacacacacacacacacaca

SEQ ID NO: 3690 - DNA, 15 bp, Homo sapiens
  source 1..15: mol_type = genomic DNA
acacacacacacaca

SEQ ID NO: 3691 - DNA, 36 bp, Homo sapiens; identical to SEQ ID NO: 3172
  source 1..36: mol_type = genomic DNA

SEQ ID NO: 3692 - DNA, 14 bp, Homo sapiens
  source 1..14: mol_type = genomic DNA
acacacacacacac

SEQ ID NO: 3693 - DNA, 40 bp, Homo sapiens; identical to SEQ ID NO: 3222
  source 1..40: mol_type = genomic DNA

SEQ ID NO: 3694 - DNA, 21 bp, Homo sapiens
  source 1..21: mol_type = genomic DNA
acacacacacacacacacaca

SEQ ID NO: 3695 - DNA, 13 bp, Homo sapiens
  source 1..13: mol_type = genomic DNA
cacacacacacac

SEQ ID NO: 3696 - DNA, 16 bp, Homo sapiens
  source 1..16: mol_type = genomic DNA
cacacacacacacaca

SEQ ID NO: 3697 - DNA, 18 bp, Homo sapiens
  source 1..18: mol_type = genomic DNA
acacacacacacacacac

SEQ ID NO: 3698 - DNA, 19 bp, Homo sapiens
  source 1..19: mol_type = genomic DNA
acacacacacacacacaca

SEQ ID NO: 3699 - DNA, 43 bp, Homo sapiens; identical to SEQ ID NO: 3159
  source 1..43: mol_type = genomic DNA

SEQ ID NO: 3700 - DNA, 12 bp, Homo sapiens
  source 1..12: mol_type = genomic DNA
acacacacacac

SEQ ID NO: 3701 - DNA, 42 bp, Homo sapiens; identical to SEQ ID NO: 3288
  source 1..42: mol_type = genomic DNA

SEQ ID NO: 3702 - DNA, 17 bp, Homo sapiens
  source 1..17: mol_type = genomic DNA
cacacacacacacacac

SEQ ID NO: 3703 - DNA, 31 bp, Homo sapiens; identical to SEQ ID NO: 3181
  source 1..31: mol_type = genomic DNA

SEQ ID NO: 3704 - DNA, 34 bp, Homo sapiens; identical to SEQ ID NO: 3338
  source 1..34: mol_type = genomic DNA

SEQ ID NO: 3705 - DNA, 30 bp, Homo sapiens
  source 1..30: mol_type = genomic DNA
cacacacacacacacacacacacacacaca

SEQ ID NO: 3706 - DNA, 26 bp, Homo sapiens
  source 1..26: mol_type = genomic DNA
acacacacacacacacacacacacac

SEQ ID NO: 3707 - DNA, 12 bp, Homo sapiens
  source 1..12: mol_type = genomic DNA
cacacacacaca

SEQ ID NO: 3708 - DNA, 13 bp, Homo sapiens
  source 1..13: mol_type = genomic DNA
acacacacacaca

SEQ ID NO: 3709 - DNA, 43 bp, Homo sapiens; identical to SEQ ID NO: 3164
  source 1..43: mol_type = genomic DNA

SEQ ID NO: 3710 - DNA, 45 bp, Homo sapiens; identical to SEQ ID NO: 3689
  source 1..45: mol_type = genomic DNA

SEQ ID NO: 3711 - DNA, 34 bp, Homo sapiens; identical to SEQ ID NO: 3206
  source 1..34: mol_type = genomic DNA

SEQ ID NO: 3712 - DNA, 26 bp, Homo sapiens
  source 1..26: mol_type = genomic DNA
acacacacacacacacacacacacac

SEQ ID NO: 3713 - DNA, 25 bp, Homo sapiens
  source 1..25: mol_type = genomic DNA
acacacacacacacacacacacaca

SEQ ID NO: 3714 - DNA, 34 bp, Homo sapiens; identical to SEQ ID NO: 3338
  source 1..34: mol_type = genomic DNA

SEQ ID NO: 3715 - DNA, 27 bp, Homo sapiens
  source 1..27: mol_type = genomic DNA
acacacacacacacacacacacacaca

SEQ ID NO: 3716 - DNA, 14 bp, Homo sapiens
  source 1..14: mol_type = genomic DNA
acacacacacacac

SEQ ID NO: 3717 - DNA, 38 bp, Homo sapiens; identical to SEQ ID NO: 3223
  source 1..38: mol_type = genomic DNA

SEQ ID NO: 3718 - DNA, 44 bp, Homo sapiens; identical to SEQ ID NO: 3165
  source 1..44: mol_type = genomic DNA

SEQ ID NO: 3719 - DNA, 20 bp, Homo sapiens
  source 1..20: mol_type = genomic DNA
acacacacacacacacacac

SEQ ID NO: 3720 - DNA, 39 bp, Homo sapiens; identical to SEQ ID NO: 3244
  source 1..39: mol_type = genomic DNA

SEQ ID NO: 3721 - DNA, 12 bp, Homo sapiens
  source 1..12: mol_type = genomic DNA
cacacacacaca

SEQ ID NO: 3722 - DNA, 13 bp, Homo sapiens
  source 1..13: mol_type = genomic DNA
cacacacacacac

SEQ ID NO: 3723 - DNA, 31 bp, Homo sapiens; identical to SEQ ID NO: 3181
  source 1..31: mol_type = genomic DNA

SEQ ID NO: 3724 - DNA, 30 bp, Homo sapiens; identical to SEQ ID NO: 3705
  source 1..30: mol_type = genomic DNA

SEQ ID NO: 3725 - DNA, 14 bp, Homo sapiens
  source 1..14: mol_type = genomic DNA
cacacacacacaca

SEQ ID NO: 3726 - DNA, 13 bp, Homo sapiens
  source 1..13: mol_type = genomic DNA
cacacacacacac

SEQ ID NO: 3727 - DNA, 14 bp, Homo sapiens
  source 1..14: mol_type = genomic DNA
cacacacacacaca

SEQ ID NO: 3728 - DNA, 45 bp, Homo sapiens; identical to SEQ ID NO: 3689
  source 1..45: mol_type = genomic DNA

SEQ ID NO: 3729 - DNA, 24 bp, Homo sapiens
  source 1..24: mol_type = genomic DNA
acacacacacacacacacacacac

SEQ ID NO: 3730 - DNA, 50 bp, Homo sapiens; identical to SEQ ID NO: 3185
  source 1..50: mol_type = genomic DNA

SEQ ID NO: 3731 - DNA, 43 bp, Homo sapiens; identical to SEQ ID NO: 3159
  source 1..43: mol_type = genomic DNA

SEQ ID NO: 3732 - DNA, 12 bp, Homo sapiens
  source 1..12: mol_type = genomic DNA
cacacacacaca

SEQ ID NO: 3733 - DNA, 47 bp, Homo sapiens; identical to SEQ ID NO: 3196
  source 1..47: mol_type = genomic DNA

SEQ ID NO: 3734 - DNA, 51 bp, Homo sapiens; identical to SEQ ID NO: 3187
  source 1..51: mol_type = genomic DNA

SEQ ID NO: 3735 - DNA, 13 bp, Homo sapiens
  source 1..13: mol_type = genomic DNA
cacacacacacac

SEQ ID NO: 3736 - DNA, 38 bp, Homo sapiens; identical to SEQ ID NO: 3216
  source 1..38: mol_type = genomic DNA

SEQ ID NO: 3737 - DNA, 13 bp, Homo sapiens
  source 1..13: mol_type = genomic DNA
cacacacacacac

SEQ ID NO: 3738 - DNA, 12 bp, Homo sapiens
  source 1..12: mol_type = genomic DNA
cacacacacaca

SEQ ID NO: 3739 - DNA, 12 bp, Homo sapiens
  source 1..12: mol_type = genomic DNA
cacacacacaca

SEQ ID NO: 3740 - DNA, 42 bp, Homo sapiens; identical to SEQ ID NO: 3195
  source 1..42: mol_type = genomic DNA

SEQ ID NO: 3741 - DNA, 25 bp, Homo sapiens
  source 1..25: mol_type = genomic DNA
cacacacacacacacacacacacac

SEQ ID NO: 3742 - DNA, 31 bp, Homo sapiens; identical to SEQ ID NO: 3181
  source 1..31: mol_type = genomic DNA

SEQ ID NO: 3743 - DNA, 23 bp, Homo sapiens
  source 1..23: mol_type = genomic DNA
cacacacacacacacacacacac

SEQ ID NO: 3744 - DNA, 12 bp, Homo sapiens
  source 1..12: mol_type = genomic DNA
cacacacacaca

SEQ ID NO: 3745 - DNA, 12 bp, Homo sapiens
  source 1..12: mol_type = genomic DNA
acacacacacac

SEQ ID NO: 3746 - DNA, 28 bp, Homo sapiens
  source 1..28: mol_type = genomic DNA
acacacacacacacacacacacacacac

SEQ ID NO: 3747 - DNA, 25 bp, Homo sapiens
  source 1..25: mol_type = genomic DNA
cacacacacacacacacacacacac

SEQ ID NO: 3748 - DNA, 12 bp, Homo sapiens
  source 1..12: mol_type = genomic DNA
acacacacacac

SEQ ID NO: 3749 - DNA, 22 bp, Homo sapiens
  source 1..22: mol_type = genomic DNA
acacacacacacacacacacac

SEQ ID NO: 3750 - DNA, 42 bp, Homo sapiens; identical to SEQ ID NO: 3288
  source 1..42: mol_type = genomic DNA

SEQ ID NO: 3751 - DNA, 18 bp, Homo sapiens
  source 1..18: mol_type = genomic DNA
cacacacacacacacaca

SEQ ID NO: 3752 - DNA, 12 bp, Homo sapiens
  source 1..12: mol_type = genomic DNA
acacacacacac

SEQ ID NO: 3753 - DNA, 38 bp, Homo sapiens; identical to SEQ ID NO: 3216
  source 1..38: mol_type = genomic DNA

SEQ ID NO: 3754 - DNA, 20 bp, Homo sapiens
  source 1..20: mol_type = genomic DNA
acacacacacacacacacac

SEQ ID NO: 3755 - DNA, 14 bp, Homo sapiens
  source 1..14: mol_type = genomic DNA
acacacacacacac

SEQ ID NO: 3756 - DNA, 35 bp, Homo sapiens; identical to SEQ ID NO: 3157
  source 1..35: mol_type = genomic DNA

SEQ ID NO: 3757 - DNA, 40 bp, Homo sapiens; identical to SEQ ID NO: 3213
  source 1..40: mol_type = genomic DNA

SEQ ID NO: 3758 - DNA, 15 bp, Homo sapiens
  source 1..15: mol_type = genomic DNA
acacacacacacaca

SEQ ID NO: 3759 - DNA, 42 bp, Homo sapiens; identical to SEQ ID NO: 3195
  source 1..42: mol_type = genomic DNA

SEQ ID NO: 3760 - DNA, 18 bp, Homo sapiens
  source 1..18: mol_type = genomic DNA
cacacacacacacacaca

SEQ ID NO: 3761 - DNA, 12 bp, Homo sapiens
  source 1..12: mol_type = genomic DNA
acacacacacac

SEQ ID NO: 3762 - DNA, 48 bp, Homo sapiens; identical to SEQ ID NO: 3413
  source 1..48: mol_type = genomic DNA

SEQ ID NO: 3763 - DNA, 22 bp, Homo sapiens
  source 1..22: mol_type = genomic DNA
cacacacacacacacacacaca

SEQ ID NO: 3764 - DNA, 13 bp, Homo sapiens
  source 1..13: mol_type = genomic DNA
acacacacacaca

SEQ ID NO: 3765 - DNA, 13 bp, Homo sapiens
  source 1..13: mol_type = genomic DNA
cacacacacacac

SEQ ID NO: 3766 - DNA, 13 bp, Homo sapiens
  source 1..13: mol_type = genomic DNA
acacacacacaca

SEQ ID NO: 3767 - DNA, 23 bp, Homo sapiens
  source 1..23: mol_type = genomic DNA
acacacacacacacacacacaca

SEQ ID NO: 3768 - DNA, 13 bp, Homo sapiens
  source 1..13: mol_type = genomic DNA
acacacacacaca

SEQ ID NO: 3769 - DNA, 17 bp, Homo sapiens
  source 1..17: mol_type = genomic DNA
acacacacacacacaca

SEQ ID NO: 3770 - DNA, 23 bp, Homo sapiens
  source 1..23: mol_type = genomic DNA
acacacacacacacacacacaca

SEQ ID NO: 3771 - DNA, 14 bp, Homo sapiens
  source 1..14: mol_type = genomic DNA
cacacacacacaca

SEQ ID NO: 3772 - DNA, 12 bp, Homo sapiens
  source 1..12: mol_type = genomic DNA
acacacacacac

SEQ ID NO: 3773 - DNA, 36 bp, Homo sapiens; identical to SEQ ID NO: 3172
  source 1..36: mol_type = genomic DNA

SEQ ID NO: 3774 - DNA, 25 bp, Homo sapiens
  source 1..25: mol_type = genomic DNA
cacacacacacacacacacacacac

SEQ ID NO: 3775 - DNA, 23 bp, Homo sapiens
  source 1..23: mol_type = genomic DNA
cacacacacacacacacacacac

SEQ ID NO: 3776 - DNA, 28 bp, Homo sapiens
  source 1..28: mol_type = genomic DNA
acacacacacacacacacacacacacac

SEQ ID NO: 3777 - DNA, 12 bp, Homo sapiens
  source 1..12: mol_type = genomic DNA
acacacacacac

SEQ ID NO: 3778 - DNA, 21 bp, Homo sapiens
  source 1..21: mol_type = genomic DNA
cacacacacacacacacacac

SEQ ID NO: 3779 - DNA, 13 bp, Homo sapiens
  source 1..13: mol_type = genomic DNA
cacacacacacac

SEQ ID NO: 3780 - DNA, 12 bp, Homo sapiens
  source 1..12: mol_type = genomic DNA
cacacacacaca

SEQ ID NO: 3781 - DNA, 151 bp, synthetic construct
  misc_feature 1..151: note = Synthetic template
  variation 19..33: note = n is a, c, g, or t
  source 1..151: mol_type = other DNA
aagttggatggtggtggtnnnnnnnnnnnnnnncacgacattccagggaacgttgcttcacatatggatttcgtaaccccccccccccccccccgaaagtacctcctatcgtccgtatdddddddddddddddggagagtgtggagggttg

SEQ ID NO: 3782 - DNA, 162 bp, synthetic construct
  misc_feature 1..162: note = Synthetic template
  variation 19..33: note = n is a, c, g, or t
  source 1..162: mol_type = other DNA
aagttggatggtggtggtnnnnnnnnnnnnnnnagcctaatactacagtgccgagcgcacgcgtgcctgctgacattgtcacacacacacacacacacacacacatttcctgggcttgtattttccaaadddddddddddddddggagagtgtggagggttg

SEQ ID NO: 3783 - DNA, 54 bp, synthetic construct
  misc_feature 1..54: note = Synthetic template
  variation 19..36: note = n is a, c, g, or t
  source 1..54: mol_type = other DNA
gtggtatcaacgcagagtnnnnnnnnnnnnnnnnnncaaccctccacactctcc

SEQ ID NO: 3784 - DNA, 18 bp, synthetic construct
  misc_feature 1..18: note = Synthetic template
  source 1..18: mol_type = other DNA
aagttggatggtggtggt

SEQ ID NO: 3785 - DNA, 18 bp, synthetic construct
  misc_feature 1..18: note = Synthetic template
  source 1..18: mol_type = other DNA
gtggtatcaacgcagagt

SEQ ID NO: 3786 - DNA, 175 bp, synthetic construct
  misc_feature 1..175: note = Synthetic template
  variation 19..33: note = n is a, c, g, or t
  variation 140..157: note = n is a, c, g, or t
  source 1..175: mol_type = other DNA
caagcctccaagctgtgcnnnnnnnnnnnnnnngtaccgaactgtacgcacgacattccagggaacgttgcttcacatatggatttcgtaactaaaaaaaaaaaaaaaaacgaaagtacctcctatcgtcgtcgacaaannnnnnnnnnnnnnnnnnactctgcgttgataccac

SEQ ID NO: 3787 - DNA, 55 bp, synthetic construct
  misc_feature 1..55: note = Synthetic template
  variation 20..37: note = n is a, c, g, or t
  source 1..55: mol_type = other DNA
aaagttgcatggtgctggtnnnnnnnnnnnnnnnnnngtggtatcaacgcagagt

SEQ ID NO: 3788 - DNA, 18 bp, synthetic construct
  misc_feature 1..18: note = Synthetic template
  source 1..18: mol_type = other DNA
caagcctccaagctgtgc

SEQ ID NO: 3789 - DNA, 19 bp, synthetic construct
  misc_feature 1..19: note = Synthetic template
  source 1..19: mol_type = other DNA
aaagttgcatggtgctggt

1. A method for measuring microsatellite lengths of initial nucleic acid templates each of which comprise a microsatellite and two flanking portions, which flanking portions delineate the microsatellite, the method comprising:
(a) generating partially mutagenized templates by:
(i) partial mutagenesis of the initial nucleic acid templates;
(ii) partial mutagenesis during production of first copies of the initial nucleic acid templates; and/or
(iii) generating first copies of the initial nucleic acid templates followed by partial mutagenesis of the first copies of the initial nucleic acid templates;
(b) making a sequencing library from the partially mutagenized templates;
(c) sequencing the library from step (b) to generate sequence reads;
(d) selecting a set of sequence reads in which the microsatellite
(i) has been disrupted by mutagenesis so that:
(1) at least two, preferably more of the tandem repeat units in the microsatellite have been mutagenized; and
(2) the microsatellite in the sequence read has no more than 7, preferably 5 or fewer, tandem repeats in a row; or
(ii) exceeds a disruption index so that the error rate between matched pairs is less than 2%, less than 1%, or preferably less than 0.5%, wherein matched pairs are independent reads that share a template, first copy, or locus; and
(e) measuring microsatellite lengths from the set of sequence reads selected in step (d), wherein the measurement is the distance between the flanking portions that delineate the microsatellite of the initial templates.

2. (canceled)

3. The method of claim 1, wherein the partial mutagenesis comprises:
(a) chemical mutagenesis;
(b) enzymatic mutagenesis; or
(C) incorporating nonstandard nucleotides during a step of replication.

4. The method of claim 1, wherein the partial mutagenesis comprises:
(a) treating the initial nucleic acid template or a first copy of the initial nucleic acid template with an enzyme that deaminates nucleotides, preferably wherein the enzyme that deaminates nucleotides is adenine deaminase;
(b) deamination of cytosines, preferably deamination of cytosines by bisulfite mutagenesis;
(c) nick translation of the initial nucleic acid template or a first copy of the initial nucleic acid template to replace nucleotides of the template with nonstandard nucleotides having altered base-pairing activity;
(d) copying the initial nucleic acid templates or first copies of the initial nucleic acid templates in the presence of a mixture of standard nucleotides and nonstandard nucleotides to generate copies comprising standard and nonstandard nucleotides, wherein the nonstandard nucleotides have altered base-pairing activity, preferably wherein the nonstandard nucleotides are deoxyinosine triphosphate;
(e) the steps of:
(i) copying the initial nucleic acid templates or first copies of the initial nucleic acid templates in the presence of a mixture of standard nucleotides and nonstandard nucleotides to generate copies comprising standard and nonstandard nucleotides; and
(ii) subjecting the copies comprising standard and nonstandard nucleotides to a chemical or enzymatic treatment that alters the base-pairing activity of a standard nucleotide without altering the base-pairing activity of its corresponding nonstandard nucleotide,
preferably wherein:
(1) the nonstandard nucleotides are 5-methylcytosine, preferably wherein chemical or enzymatic treatment comprises using a TET2 enzyme to oxidize 5-methylcytosine into 5-carboxycytosine;
(2) the chemical or enzymatic treatment comprises using an APOBEC enzyme to convert cytosines to uracils;
preferably wherein:
(a) the partial mutagenesis is followed by production of first copies in the presence of a mixture of 5-methyl-dCTP and standard nucleotides, preferably wherein 5-methyl-dCTP is present in the mixture at about the same concentration as dCTP; or
(f) the steps of:
(i) copying the initial nucleic acid templates or first copies of the initial nucleic acid templates in the presence of a mixture of standard nucleotides and nonstandard nucleotides to generate copies comprising standard and nonstandard nucleotides; and
(ii) subjecting the copies comprising standard and nonstandard nucleotides to a chemical or enzymatic treatment that alters the base-pairing activity of the nonstandard nucleotide without altering the base-pairing activity of its corresponding standard nucleotide.

5. The method of claim 1, comprising a step of protecting the flanking portions of the initial nucleic acid templates or first copies of the initial nucleic acid templates from partial mutagenesis, preferably wherein protecting the flanking portions of the initial nucleic acid templates or first copies of the initial nucleic acid templates comprises using an excess of oligonucleotides complementary to the flanking portions to protect the flanking portions from partial mutagenesis, preferably wherein the partial mutagenesis comprises deamination of cytosines, preferably deamination of cytosines by bisulfite mutagenesis.

6. The method of claim 1, wherein the initial nucleic acid templates:
(a) are from a biological sample, preferably wherein the biological sample is:
(i) from a tissue biopsy;
(ii) from blood or a blood product;
(iii) from excreta, preferably urine or fecal matter; or
(iv) sputum;
(b) are copies of nucleic acids from a biological sample, preferably wherein the biological sample is:
(i) from a tissue biopsy;
(ii) from blood or a blood product;
(iii) from excreta, preferably urine or fecal matter; or
(iv) sputum; or
(c) are synthetic templates, preferably wherein the synthetic templates each comprise two flanking portions and a microsatellite of known composition n and length, each optionally comprising a varietal tag, a sample barcode, and/or a universal primer binding site, wherein the microsatellite:
(i) comprises nucleotides susceptible to being altered by the step of partial mutagenesis; or
(ii) comprises a known pattern of mutation;
(d) were prepared by random fragmentation of nucleic acids, preferably wherein the random fragmentation was by:
(i) a natural process, preferably degradation of nucleic acids;
(ii) shearing; and/or
(iii) endonucleases,
(e) were prepared by restriction endonuclease cleavage of nucleic acids;
(f) are in a sample that has been enriched for microsatellites by a panel comprising oligonucleotides with sequence complementarity to:
(i) one or more microsatellite flanking portions; or
(ii) a microsatellite repeat motif;
(g) are in a sample enriched for microsatellites and the method comprises a step of enriching a sample comprising a population of nucleic acid templates for microsatellites using a panel comprising oligonucleotides with sequence complementarity to:
(i) one or more microsatellite flanking portions; or
(ii) a microsatellite repeat motif;
(h) comprise one or more adaptors, preferably wherein the one or more adaptors convey template identity and/or sample identity, more preferably wherein the one or more adaptors comprise one or more or all of the following:
(i) a varietal tag;
(ii) a sample barcode;
(iii) a universal primer binding site;
(iv) a purification moiety, preferably biotin; and
(v) a sequencing primer binding site more preferably wherein the one or more adaptors:
(1) consist of nucleotides that are:
(i) not susceptible to being altered in the step of partial mutagenesis; or
(ii) complementary to nucleotide that are not susceptible to being altered in the step of partial mutagenesis;
(2) are added to the initial nucleic templates, first copies of the initial nucleic acid templates, and/or partially mutagenized templates by:
(i) ligation; or
(ii) primer extension; and/or
(3) have a fish-tail structure.

7. (canceled)

8. The method of any one of claims 1 to 7, wherein:
(a) step (a) comprises a step of enriching partially mutagenized templates for microsatellites using a panel comprising oligonucleotides with sequence complementarity to:
(i) one or more microsatellite flanking portions; or
(ii) a microsatellite repeat motif;
preferably wherein the panel is:
(1) a panel of hybridization capture probes; or
(2) a panel of primers to initiate replication; and/or
(b) step (a), part (i) comprises generating first copies of the partially mutagenized templates, preferably wherein one or more adaptors are added to the first copies, more preferably wherein the one or more adaptors comprise one or more or all of the following:
(i) a varietal tag;
(ii) a sample barcode;
(iii) a universal primer binding site; and
(iv) a purification moiety, preferably biotin.

9. The method of claim 1, wherein the initial nucleic acid templates and/or first copies thereof comprise one or more individual identifiers, preferably wherein the one or more individual identifiers comprise:
(a) fragment end sequences if the initial nucleic acid template is from a biological sample and is randomly fragmented;
(b) fragment end sequences if the initial nucleic acid template was prepared using random fragmentation;
(c) a mutational pattern caused by the step of partial mutagenesis, wherein the step of partial mutagenesis is partial random mutagenesis;
(d) a varietal tag attached to the initial nucleic acid templates or first copies of the initial nucleic acid templates;
(e) a sequence of the flanking portions of the microsatellite, which:
(i) specify the locus of the microsatellite in a reference genome if the initial nucleic acid template is from a biological sample; or
(ii) specify a synthetic nucleic acid molecule if the initial nucleic acid template is a synthetic template; or
(f) any combination of the above.

10-12. (canceled)

13. The method of claim 1, wherein step (b) comprises amplification of the partially mutagenized templates, preferably wherein amplification comprises linear amplification, exponential amplification, or both;
more preferably wherein amplification is with:
(i) a DNA polymerase;
(ii) a RNA polymerase; or
(iii) a reverse transcriptase.
even more preferably wherein:
(1) amplification is with primers consisting of nucleotides that are not susceptible to being altered in the step of partial mutagenesis;
(2) amplification is by polymerase chain reaction (PCR); and/or
(3) step (b) comprises:
(a) end-polishing, A-tailing, and sequencing adaptor ligation; and/or
(b) enriching the partially mutagenized templates for microsatellites, before or after amplification, preferably wherein enriching is with a panel comprising oligonucleotides with sequence complementarity to:
(i) one or more microsatellite flanking portions; or
(ii) a microsatellite repeat motif.
preferably wherein the panel is:
(1) a panel of hybridization capture probes; or
(2) a panel of primers to initiate replication;
optionally wherein the partially mutagenized templates comprise a purification moiety and step (b) comprises purifying the partially mutagenized templates using the purification moiety, preferably prior to a step of exponential amplification, preferably wherein the purification moiety is biotin and the partially mutagenized templates are purified by binding of the purification moiety to streptavidin.

14-16. (canceled)

17. The method of claim 1, wherein:
(a) the sequence reads:
(i) are single reads or paired end reads;
(ii) have sample barcode sequences; and/or
(iii) have varietal tag sequences; and/or
(b) the microsatellites:
(i) are at least four repeat units in length;
(ii) comprise repeat units, each of which is no more than 10 nucleotides;
(iii) are at least 12 nucleotides in length;
(iv) are mononucleotide tracts, preferably mono-C tracts;
(v) are dinucleotide tracts, preferably C/G tracts or C/A tracts;
(vi) comprise cytosines;
(vii) comprise adenines;
(viii) are susceptible to a method of partial mutagenesis;
(ix) are known to have unstable replication;
(x) are more than 5 repeat units in length, more than 7 repeat units in length, more than 10 repeat units in length, more than 15 repeat units in length, more than 20 repeat units in length, more than 30 repeat units in length, between 6 and 70 repeat units in length, between 6 and 32 repeat units in length or between 12 and 64 repeat units in length; and/or
(xi) are from a genome of an organism and adjoin flanking portions in the genome of the organism, wherein a flanking portion together with the microsatellite map uniquely to the genome to define the locus of the microsatellite, and wherein the flanking portions delineate the length of the microsatellite.

18. (canceled)

19. The method of claim 1, comprising establishing one or more provenances of the sequence reads, preferably wherein the one or more provenances are:
(a) a locus in a reference genome and the provenance is established using a sequence in one or both of the flanking portions;
(b) a synthetic nucleic acid template and the provenance is established using a sequence in one or both of the flanking portions;
(c) an initial nucleic acid template with a specific individual identifier and the provenance is established using said individual identifier;
(d) a first copy of an initial nucleic acid template with a specific individual identifier and the provenance is established using said individual identifier;
(e) a partially mutagenized template with a specific individual identifier and the provenance is established using said individual identifier;
(f) a partially mutagenized first copy of an initial nucleic acid template with a specific individual identifier and the provenance is established using said individual identifier;
(g) a sample with a specific sample barcode and the provenance is established using said sample barcode; and/or
(h) a partially mutagenized template with a specific degree of microsatellite disruption preferably wherein the provenance is established based a common maximum repeat length and/or a common proportion of mutagenized bases.
preferably wherein the individual identifier comprises:
(iii) fragment end sequences if the initial nucleic acid template is from a biological sample and is randomly fragmented;
(ii) fragment end sequences if the initial nucleic acid template was prepared using random fragmentation;
(iii) a mutational pattern caused by the step of partial mutagenesis, wherein the step of partial mutagenesis is partial random mutagenesis;
(iv) a varietal tag attached to the initial nucleic acid templates or first copies of the initial nucleic acid templates;
(v) a sequence of the flanking portions of the microsatellite, which
(1) specify the locus of the microsatellite in a reference genome if the initial nucleic acid template is from a biological sample; or
(2) specify a synthetic nucleic acid molecule if the initial nucleic acid template is a synthetic template; or
(vi) any combination of the above.

20. The method of claim 1, further comprising generating a distribution of microsatellite read lengths by counting the number of microsatellites of a given length across all measured microsatellite lengths in a set of sequence reads having a shared provenance, wherein the shared provenance is selected from the group consisting of:
(a) sample;
(b) locus;
(c) synthetic template;
(d) initial template identity;
(e) first copy identity; or
(f) degree of disruption;
preferably comprising generating a distribution of consensus microsatellite lengths, wherein:
(i) the consensus microsatellite lengths derive from the distribution of microsatellite read lengths over a set of identified templates by applying a consensus rule;
(ii) the consensus microsatellite lengths derive from the distribution of microsatellite read lengths over a set of identified first copies by applying a consensus rule; or
(iii) the consensus microsatellite lengths derive from a distribution of consensus microsatellite lengths over a set of identified first copies sharing a set of identified initial nucleic acid templates by applying a consensus rule;
more preferably wherein the consensus rule is chosen from the group consisting of:
(i) a unanimity rule, in which the consensus microsatellite length is the only microsatellite length in the distribution and all other microsatellite lengths have a count of zero;
(ii) a plurality rule, in which the consensus microsatellite length is the most common microsatellite length in the distribution;
(iii) the majority P-rule, in which the consensus microsatellite length is the microsatellite length with a count that is greater than or equal to N×P where N is the total number of microsatellite lengths and P is greater than or equal to 0.5;
optionally wherein:
(i) the sequencing library is enriched for microsatellites by a panel comprising oligonucleotides with sequence complementarity to one or more microsatellite flanking portions at one or more loci and optionally comprises synthetic nucleic acid templates of known microsatellite composition, length, and degree of disruption; and
(ii) distributions of microsatellite lengths at one or more loci are generated by:
(1) using an exact matching algorithm to identify matches between the sequence reads and an alignment index database, wherein the alignment index database comprises, for each locus corresponding to a microsatellite of the panel and for each synthetic nucleic acid template, if present:
(1) a subsequence for each flanking portion and all possible variations that can arise from partial mutagenesis; and
(2) the distance of each said subsequence to the microsatellite;
(2) for each sequence read that matches a subsequence of the alignment index database measuring the microsatellite length using the distance in the alignment index database; and
(3) counting the number of microsatellites of a given length across all measured microsatellite lengths in a set of sequence reads having a shared provenance, wherein the shared provenance is selected from the group consisting of:
(1) sample;
(2) locus;
(3) synthetic template;
(4) initial template identity;
(5) first copy identity; and/or
(6) degree of disruption.

21-22. (canceled)

23. The method of claim 1, wherein the step of selecting a set of sequence reads comprises:
(a) using a look-up table of disruption and error rates to estimate the replication error associated with a given pattern of disruption in a sequence read;
(b) selecting sequence reads based on the estimated replication error.

24-25. (canceled)

26. The method of claim 1, comprising estimating a confidence interval for the proportion of initial templates with a microsatellite length L at a single locus in a single sample, wherein the confidence interval is estimated using the distribution of measured microsatellite lengths in reads with a given degree of disruption and a look-up table of disruption and error rates, preferably wherein:
(a) the look-up table of disruption and error rates was generated using synthetic templates that match the microsatellite tracts of the initial templates in composition and length; or
(b) the look-up table of disruption and error rates was generated by:
(i) preparing distributions of read lengths and consensus read lengths of synthetic nucleic acid templates of known microsatellite composition, length, and degree of disruption;
(ii) from the distributions of read lengths and consensus read lengths, estimating an error rate per round of replications as a function of the degree of disruption; and
(iii) from the estimated error rate per round of replication, generating a look-up table of the moments of error as a function of the degree of disruption and number of rounds of replication;
more preferably wherein the confidence interval is used:
(a) to determine the profile of microsatellite length variation in a tumor;
(b) to genotype an individual;
(c) to detect disease loci;
(d) for early detection of cancer; or
(e) to determine the health of a sampled tissue.

27. (canceled)

28. A method of comparing two or more samples over one or more microsatellite loci for microsatellites of length L comprising:
(a) estimating a confidence interval for each sample, each locus, and each microsatellite length L according to the method of claim 26; and
(b) comparing the estimated confidence intervals;
preferably wherein the two or more samples are from:
(i) different tissues of the same person, preferably a tumor biopsy and a blood sample;
(ii) same tissues sampled at different times, preferably blood, before and after a treatment;
(iii) same tissue, fractionated into components, preferably blood cells and cell-free components of blood; or
(iv) different persons, preferably for forensics, parentage determination, and population studies.

29. (canceled)

30. A method of measuring deviation of microsatellite lengths at one or more loci in a sample relative to microsatellite lengths at the one or more loci of a mono-allelic or bi-allelic baseline sample, the method comprising:
(a) determining a distribution of microsatellite lengths P(l) in the sample at each of the one or more loci according to the method of any one of claims 20 to 22,
(b) calculating a K-eccentricity E_{K}(A,B,P) of the sample to the baseline sample at each of the one or more loci, wherein for a given locus with baseline microsatellite lengths (A, B)
$${E}_{K} ( A , B , P ) = {\sum }_{l} P ( l ) min {( \vert A - l \vert , \vert B - l \vert )}^{K}$$
wherein K is a positive integer and the K-eccentricity E_{K}(A,B,P) is a measure of the deviation of microsatellite lengths at each locus in the sample relative to the microsatellite lengths (A, B) at the locus of a mono-allelic or bi-allelic baseline sample;
preferably wherein:
(1) the mono-allelic or bi-allelic baseline sample is a germline sample;
(ii) the sample:
(1) is a blood sample, preferably blood cells or cell-free component of the blood sample; or
(2) is a sample from a tumor; and/or
(iii) the method further comprises:
(1) calculating the mean K-eccentricity of all mono-C and all d-AC loci of the sample for which a distribution of microsatellite lengths P(l) was determined; and/or
(2) calculating the mean K-eccentricity of all mono-C and all d-AC loci that exhibit low eccentricity in a normal sample.

31. (canceled)

32. A sequencing library:
(a) comprising nucleic acid templates, wherein at least 5%, preferably at least 10%, more preferably at least 208, and more preferably at least 30% of the nucleic acid templates comprise:
(i) a mutagenized microsatellite in which:
(1) at least two, preferably more of the tandem repeat units in the microsatellite have been mutagenized; and
(2) the mutagenized microsatellite has no more than 7, preferably 5 or fewer, tandem repeats in a row; and
(ii) two flanking portions;
preferably wherein the sequencing library:
(1) comprises at least 100, at least 1,000, at least 1×10⁴, at least 3×10⁴, or at least 6×10⁴ nucleic acid templates; and/or
(2) was enriched from a whole genome; or
(b) comprising nucleic acid templates which comprise:
(i) a mutagenized microsatellite in which:
(1) at least two, preferably more of the tandem repeat units in the microsatellite have been mutagenized; and
(2) the mutagenized microsatellite has no more than 7, preferably 5 or fewer, tandem repeats in a row; and
(ii) flanking portions which are not mutagenized;
preferably wherein the sequencing library is a whole genome sequencing library.

33-35. (canceled)

36. A panel comprising a set of 6 or more oligonucleotides with sequences complementary to a flanking portion of microsatellites that are susceptible to the partial mutagenesis of claim 1, preferably wherein:
(a) the microsatellites are at least four repeat units in length;
(b) the microsatellites comprise repeat units, each of which is no more than 10 nucleotides;
(c) the microsatellites are at least 12 nucleotides in length;
(d) the microsatellites are mononucleotide tracts, preferably mono-C tracts;
(e) the microsatellites are dinucleotide tracts, preferably C/G tracts or C/A tracts;
(f) the microsatellites comprise cytosines;
(g the microsatellites comprise adenines;
(h) the microsatellites are known to have repeat length variability;
(i) the microsatellites are more than 5 repeat units in length, more than 7 repeat units in length, more than 10 repeat units in length, more than 15 repeat units in length, more than 20 repeat units in length, more than 30 repeat units in length, between 6 and 70 repeat units in length, between 6 and 32 repeat units in length or between 12 and 64 repeat units in length;
(j) the microsatellite comprises a flanking portion which, together with the microsatellite, maps uniquely to the genome; and/or
(k) the oligonucleotides are complementary to flanking portions that do not hybridize to other flanking portions;
more preferably wherein the panel is:
(i) a panel of hybridization capture probes; or
(ii) a panel of primers to initiate replication.

37-38. (canceled)

39. The panel of claim 36, wherein the sequences of the oligonucleotides are complementary to one or more of the sequences set forth in SEQ ID NOs: 1-1260 and 1891-3150.

40. A kit for performing the method of claim 1.

41. A kit comprising the panel of claim 36, further comprising one or more or all of the following:
(a) synthetic nucleic acid templates, each comprising two flanking portions and a microsatellite of known composition and length, each optionally comprising a varietal tag, a sample barcode, and/or a universal primer binding site, wherein the microsatellite:
(i) comprises nucleotides susceptible to being altered by a step of partial mutagenesis; or
(ii) comprises a known pattern of mutation;
(b) oligonucleotide adaptors, optionally fish-tail adaptors, each of which comprise one or more of the following:
(i) a varietal tag;
(ii) a sample barcode;
(iii) a universal primer binding site; and
(iv) a purification moiety, preferably biotin;
(c) primers to initiate replication, wherein the primers are complementary to:
(i) a universal primer binding site;
(ii) a flanking portion of a synthetic nucleic acid template;
(iii) a flanking portion of an initial nucleic acid template, which initial nucleic acid templates comprise a microsatellite and two flanking portions, optionally wherein the sequences of the primers are complementary to one or more of the sequences set forth in SEQ ID NOs: 1-1260 and 1891-3150; and/or
(iv) a flanking portion of a first copy of an initial nucleic acid template, which initial nucleic acid templates comprise a microsatellite and two flanking portions; and
(d) a set of oligonucleotide blockers complementary to flanking portions of the microsatellites of the panel, optionally wherein the sequences of the oligonucleotide blockers are complementary to one or more of the sequences set forth in SEQ ID NOs: 1-1260 and 1891-3150;
wherein the oligonucleotide adaptors and primers to initiate replication preferably consist of nucleotides which (1) are not susceptible to being altered by a step of partial mutagenesis, and/or (2) are complementary to nucleotides which are not susceptible to being altered by a step of partial mutagenesis;
the kit preferably further comprising:
(i) enzymes or chemicals for partial mutagenesis of initial nucleic acid templates; and/or
(ii) computer-readable media comprising:
(1) an alignment index database comprising, for each locus corresponding to a microsatellite of the panel of the kit, and for each synthetic nucleic acid template of the kit, if present:
(a) a subsequence for each flanking portion and all possible variations that can arise from partial mutagenesis; and
(b) the distance of each said subsequence to the microsatellite; and/or
(2) software for matching sequence reads to subsequences of the alignment index database; and/or
(iii) each of the following:
(1) double-stranded synthetic nucleic acid templates, comprising a flanking portion complementary to a sequence of the panel;
(2) single-stranded synthetic nucleic acid templates, each comprising a microsatellite comprising nucleotides susceptible to being altered by a step of partial mutagenesis; and
(3) single-stranded synthetic nucleic acid templates, each comprising a microsatellite with a known pattern of mutation.

42. (canceled)
